United States Patent Application Publication US 2024/0075067 A1 - sequence listing, part 2

SEQ ID NO: 17288 - DNA, 18 bp, synthetic construct
  misc_feature 1..18: note = Artificial sequence related to HLA knockouts in cell therapy
  source 1..18: mol_type = other DNA
cgtgcggttcgacagcga

SEQ ID NO: 17289 - DNA, 18 bp, synthetic construct
  misc_feature 1..18: note = Artificial sequence related to HLA knockouts in cell therapy
  source 1..18: mol_type = other DNA
gtgcggttcgacagcgac

SEQ ID NO: 17290 - DNA, 18 bp, synthetic construct
  misc_feature 1..18: note = Artificial sequence related to HLA knockouts in cell therapy
  source 1..18: mol_type = other DNA
tgcggttcgacagcgacg

SEQ ID NO: 17291 - DNA, 18 bp, synthetic construct
  misc_feature 1..18: note = Artificial sequence related to HLA knockouts in cell therapy
  source 1..18: mol_type = other DNA
gcggttcgacagcgacgc

SEQ ID NO: 17292 - DNA, 18 bp, synthetic construct
  misc_feature 1..18: note = Artificial sequence related to HLA knockouts in cell therapy
  source 1..18: mol_type = other DNA
cggttcgacagcgacgcc

SEQ ID NO: 17293 - DNA, 18 bp, synthetic construct
  misc_feature 1..18: note = Artificial sequence related to HLA knockouts in cell therapy
  source 1..18: mol_type = other DNA
ggttcgacagcgacgccg

SEQ ID NO: 17294 - DNA, 18 bp, synthetic construct
  misc_feature 1..18: note = Artificial sequence related to HLA knockouts in cell therapy
  source 1..18: mol_type = other DNA
gttcgacagcgacgccgc

SEQ ID NO: 17295 - DNA, 18 bp, synthetic construct
  misc_feature 1..18: note = Artificial sequence related to HLA knockouts in cell therapy
  source 1..18: mol_type = other DNA
ttcgacagcgacgccgcg

SEQ ID NO: 17296 - DNA, 18 bp, synthetic construct
  misc_feature 1..18: note = Artificial sequence related to HLA knockouts in cell therapy
  source 1..18: mol_type = other DNA
tcgacagcgacgccgcga

SEQ ID NO: 17297 - DNA, 18 bp, synthetic construct
  misc_feature 1..18: note = Artificial sequence related to HLA knockouts in cell therapy
  source 1..18: mol_type = other DNA
cgacagcgacgccgcgag

SEQ ID NO: 17298 - DNA, 18 bp, synthetic construct
  misc_feature 1..18: note = Artificial sequence related to HLA knockouts in cell therapy
  source 1..18: mol_type = other DNA
gacagcgacgccgcgagc

SEQ ID NO: 17299 - DNA, 18 bp, synthetic construct
  misc_feature 1..18: note = Artificial sequence related to HLA knockouts in cell therapy
  source 1..18: mol_type = other DNA
acagcgacgccgcgagcc

SEQ ID NO: 17300 - DNA, 18 bp, synthetic construct
  misc_feature 1..18: note = Artificial sequence related to HLA knockouts in cell therapy
  source 1..18: mol_type = other DNA
cagcgacgccgcgagcca

SEQ ID NO: 17301 - DNA, 18 bp, synthetic construct
  misc_feature 1..18: note = Artificial sequence related to HLA knockouts in cell therapy
  source 1..18: mol_type = other DNA
agcgacgccgcgagccag

SEQ ID NO: 17302 - DNA, 18 bp, synthetic construct
  misc_feature 1..18: note = Artificial sequence related to HLA knockouts in cell therapy
  source 1..18: mol_type = other DNA
gcgacgccgcgagccaga

SEQ ID NO: 17303 - DNA, 18 bp, synthetic construct
  misc_feature 1..18: note = Artificial sequence related to HLA knockouts in cell therapy
  source 1..18: mol_type = other DNA
cgacgccgcgagccagag

SEQ ID NO: 17304 - DNA, 18 bp, synthetic construct
  misc_feature 1..18: note = Artificial sequence related to HLA knockouts in cell therapy
  source 1..18: mol_type = other DNA
gacgccgcgagccagagg

SEQ ID NO: 17305 - DNA, 18 bp, synthetic construct
  misc_feature 1..18: note = Artificial sequence related to HLA knockouts in cell therapy
  source 1..18: mol_type = other DNA
acgccgcgagccagagga

SEQ ID NO: 17306 - DNA, 18 bp, synthetic construct
  misc_feature 1..18: note = Artificial sequence related to HLA knockouts in cell therapy
  source 1..18: mol_type = other DNA
cgccgcgagccagaggat

SEQ ID NO: 17307 - DNA, 18 bp, synthetic construct
  misc_feature 1..18: note = Artificial sequence related to HLA knockouts in cell therapy
  source 1..18: mol_type = other DNA
gccgcgagccagaggatg

SEQ ID NO: 17308 - DNA, 18 bp, synthetic construct
  misc_feature 1..18: note = Artificial sequence related to HLA knockouts in cell therapy
  source 1..18: mol_type = other DNA
ccgcgagccagaggatgg

SEQ ID NO: 17309 - DNA, 18 bp, synthetic construct
  misc_feature 1..18: note = Artificial sequence related to HLA knockouts in cell therapy
  source 1..18: mol_type = other DNA
cgcgagccagaggatgga

SEQ ID NO: 17310 - DNA, 18 bp, synthetic construct
  misc_feature 1..18: note = Artificial sequence related to HLA knockouts in cell therapy
  source 1..18: mol_type = other DNA
gcgagccagaggatggag

SEQ ID NO: 17311 - DNA, 18 bp, synthetic construct
  misc_feature 1..18: note = Artificial sequence related to HLA knockouts in cell therapy
  source 1..18: mol_type = other DNA
cgagccagaggatggagc

SEQ ID NO: 17312 - DNA, 18 bp, synthetic construct
  misc_feature 1..18: note = Artificial sequence related to HLA knockouts in cell therapy
  source 1..18: mol_type = other DNA
gagccagaggatggagcc

SEQ ID NO: 17313 - DNA, 18 bp, synthetic construct
  misc_feature 1..18: note = Artificial sequence related to HLA knockouts in cell therapy
  source 1..18: mol_type = other DNA
agccagaggatggagccg

SEQ ID NO: 17314 - DNA, 18 bp, synthetic construct
  misc_feature 1..18: note = Artificial sequence related to HLA knockouts in cell therapy
  source 1..18: mol_type = other DNA
gccagaggatggagccgc

SEQ ID NO: 17315 - DNA, 18 bp, synthetic construct
  misc_feature 1..18: note = Artificial sequence related to HLA knockouts in cell therapy
  source 1..18: mol_type = other DNA
ccagaggatggagccgcg

SEQ ID NO: 17316 - DNA, 18 bp, synthetic construct
  misc_feature 1..18: note = Artificial sequence related to HLA knockouts in cell therapy
  source 1..18: mol_type = other DNA
cagaggatggagccgcgg

SEQ ID NO: 17317 - DNA, 18 bp, synthetic construct
  misc_feature 1..18: note = Artificial sequence related to HLA knockouts in cell therapy
  source 1..18: mol_type = other DNA
agaggatggagccgcggg

SEQ ID NO: 17318 - DNA, 18 bp, synthetic construct
  misc_feature 1..18: note = Artificial sequence related to HLA knockouts in cell therapy
  source 1..18: mol_type = other DNA
gaggatggagccgcgggc

SEQ ID NO: 17319 - DNA, 18 bp, synthetic construct
  misc_feature 1..18: note = Artificial sequence related to HLA knockouts in cell therapy
  source 1..18: mol_type = other DNA
aggatggagccgcgggcg

SEQ ID NO: 17320 - DNA, 18 bp, synthetic construct
  misc_feature 1..18: note = Artificial sequence related to HLA knockouts in cell therapy
  source 1..18: mol_type = other DNA
ggatggagccgcgggcgc

SEQ ID NO: 17321 - DNA, 18 bp, synthetic construct
  misc_feature 1..18: note = Artificial sequence related to HLA knockouts in cell therapy
  source 1..18: mol_type = other DNA
gatggagccgcgggcgcc

SEQ ID NO: 17322 - DNA, 18 bp, synthetic construct
  misc_feature 1..18: note = Artificial sequence related to HLA knockouts in cell therapy
  source 1..18: mol_type = other DNA
atggagccgcgggcgccg

SEQ ID NO: 17323 - DNA, 18 bp, synthetic construct
  misc_feature 1..18: note = Artificial sequence related to HLA knockouts in cell therapy
  source 1..18: mol_type = other DNA
tggagccgcgggcgccgt

SEQ ID NO: 17324 - DNA, 18 bp, synthetic construct
  misc_feature 1..18: note = Artificial sequence related to HLA knockouts in cell therapy
  source 1..18: mol_type = other DNA
ggagccgcgggcgccgtg

SEQ ID NO: 17325 - DNA, 18 bp, synthetic construct
  misc_feature 1..18: note = Artificial sequence related to HLA knockouts in cell therapy
  source 1..18: mol_type = other DNA
gagccgcgggcgccgtgg

SEQ ID NO: 17326 - DNA, 18 bp, synthetic construct
  misc_feature 1..18: note = Artificial sequence related to HLA knockouts in cell therapy
  source 1..18: mol_type = other DNA
agccgcgggcgccgtgga

SEQ ID NO: 17327 - DNA, 18 bp, synthetic construct
  misc_feature 1..18: note = Artificial sequence related to HLA knockouts in cell therapy
  source 1..18: mol_type = other DNA
gccgcgggcgccgtggat

SEQ ID NO: 17328 - DNA, 18 bp, synthetic construct
  misc_feature 1..18: note = Artificial sequence related to HLA knockouts in cell therapy
  source 1..18: mol_type = other DNA
ccgcgggcgccgtggata

SEQ ID NO: 17329 - DNA, 18 bp, synthetic construct
  misc_feature 1..18: note = Artificial sequence related to HLA knockouts in cell therapy
  source 1..18: mol_type = other DNA
cgcgggcgccgtggatag

SEQ ID NO: 17330 - DNA, 18 bp, synthetic construct
  misc_feature 1..18: note = Artificial sequence related to HLA knockouts in cell therapy
  source 1..18: mol_type = other DNA
gcgggcgccgtggataga

SEQ ID NO: 17331 - DNA, 18 bp, synthetic construct
  misc_feature 1..18: note = Artificial sequence related to HLA knockouts in cell therapy
  source 1..18: mol_type = other DNA
cgggcgccgtggatagag

SEQ ID NO: 17332 - DNA, 18 bp, synthetic construct
  misc_feature 1..18: note = Artificial sequence related to HLA knockouts in cell therapy
  source 1..18: mol_type = other DNA
gggcgccgtggatagagc

SEQ ID NO: 17333 - DNA, 18 bp, synthetic construct
  misc_feature 1..18: note = Artificial sequence related to HLA knockouts in cell therapy
  source 1..18: mol_type = other DNA
ggcgccgtggatagagca

SEQ ID NO: 17334 - DNA, 18 bp, synthetic construct
  misc_feature 1..18: note = Artificial sequence related to HLA knockouts in cell therapy
  source 1..18: mol_type = other DNA
gcgccgtggatagagcag

SEQ ID NO: 17335 - DNA, 18 bp, synthetic construct
  misc_feature 1..18: note = Artificial sequence related to HLA knockouts in cell therapy
  source 1..18: mol_type = other DNA
cgccgtggatagagcagg

SEQ ID NO: 17336 - DNA, 18 bp, synthetic construct
  misc_feature 1..18: note = Artificial sequence related to HLA knockouts in cell therapy
  source 1..18: mol_type = other DNA
gccgtggatagagcagga

SEQ ID NO: 17337 - DNA, 18 bp, synthetic construct
  misc_feature 1..18: note = Artificial sequence related to HLA knockouts in cell therapy
  source 1..18: mol_type = other DNA
ccgtggatagagcaggag

SEQ ID NO: 17338 - DNA, 18 bp, synthetic construct
  misc_feature 1..18: note = Artificial sequence related to HLA knockouts in cell therapy
  source 1..18: mol_type = other DNA
cgtggatagagcaggagg

SEQ ID NO: 17339 - DNA, 18 bp, synthetic construct
  misc_feature 1..18: note = Artificial sequence related to HLA knockouts in cell therapy
  source 1..18: mol_type = other DNA
gtggatagagcaggaggg

SEQ ID NO: 17340 - DNA, 18 bp, synthetic construct
  misc_feature 1..18: note = Artificial sequence related to HLA knockouts in cell therapy
  source 1..18: mol_type = other DNA
ggatagagcaggagggtc

SEQ ID NO: 17341 - DNA, 18 bp, synthetic construct
  misc_feature 1..18: note = Artificial sequence related to HLA knockouts in cell therapy
  source 1..18: mol_type = other DNA
gatagagcaggagggtcc

SEQ ID NO: 17342 - DNA, 18 bp, synthetic construct
  misc_feature 1..18: note = Artificial sequence related to HLA knockouts in cell therapy
  source 1..18: mol_type = other DNA
atagagcaggagggtccg

SEQ ID NO: 17343 - DNA, 18 bp, synthetic construct
  misc_feature 1..18: note = Artificial sequence related to HLA knockouts in cell therapy
  source 1..18: mol_type = other DNA
tagagcaggagggtccgg

SEQ ID NO: 17344 - DNA, 18 bp, synthetic construct
  misc_feature 1..18: note = Artificial sequence related to HLA knockouts in cell therapy
  source 1..18: mol_type = other DNA
agagcaggagggtccgga

SEQ ID NO: 17345 - DNA, 18 bp, synthetic construct
  misc_feature 1..18: note = Artificial sequence related to HLA knockouts in cell therapy
  source 1..18: mol_type = other DNA
gagcaggagggtccggag

SEQ ID NO: 17346 - DNA, 18 bp, synthetic construct
  misc_feature 1..18: note = Artificial sequence related to HLA knockouts in cell therapy
  source 1..18: mol_type = other DNA
agcaggagggtccggagt

SEQ ID NO: 17347 - DNA, 18 bp, synthetic construct
  misc_feature 1..18: note = Artificial sequence related to HLA knockouts in cell therapy
  source 1..18: mol_type = other DNA
gcaggagggtccggagta

SEQ ID NO: 17348 - DNA, 18 bp, synthetic construct
  misc_feature 1..18: note = Artificial sequence related to HLA knockouts in cell therapy
  source 1..18: mol_type = other DNA
caggagggtccggagtat

SEQ ID NO: 17349 - DNA, 18 bp, synthetic construct
  misc_feature 1..18: note = Artificial sequence related to HLA knockouts in cell therapy
  source 1..18: mol_type = other DNA
ggagggtccggagtattg

SEQ ID NO: 17350 - DNA, 18 bp, synthetic construct
  misc_feature 1..18: note = Artificial sequence related to HLA knockouts in cell therapy
  source 1..18: mol_type = other DNA
gagggtccggagtattgg

SEQ ID NO: 17351 - DNA, 18 bp, synthetic construct
  misc_feature 1..18: note = Artificial sequence related to HLA knockouts in cell therapy
  source 1..18: mol_type = other DNA
agggtccggagtattggg

SEQ ID NO: 17352 - DNA, 18 bp, synthetic construct
  misc_feature 1..18: note = Artificial sequence related to HLA knockouts in cell therapy
  source 1..18: mol_type = other DNA
gggtccggagtattggga

SEQ ID NO: 17353 - DNA, 18 bp, synthetic construct
  misc_feature 1..18: note = Artificial sequence related to HLA knockouts in cell therapy
  source 1..18: mol_type = other DNA
ggtccggagtattgggac

SEQ ID NO: 17354 - DNA, 18 bp, synthetic construct
  misc_feature 1..18: note = Artificial sequence related to HLA knockouts in cell therapy
  source 1..18: mol_type = other DNA
gtccggagtattgggacg

SEQ ID NO: 17355 - DNA, 18 bp, synthetic construct
  misc_feature 1..18: note = Artificial sequence related to HLA knockouts in cell therapy
  source 1..18: mol_type = other DNA
tccggagtattgggacgg

SEQ ID NO: 17356 - DNA, 18 bp, synthetic construct
  misc_feature 1..18: note = Artificial sequence related to HLA knockouts in cell therapy
  source 1..18: mol_type = other DNA
ccggagtattgggacggg

SEQ ID NO: 17357 - DNA, 18 bp, synthetic construct
  misc_feature 1..18: note = Artificial sequence related to HLA knockouts in cell therapy
  source 1..18: mol_type = other DNA
cggagtattgggacgggg

SEQ ID NO: 17358 - DNA, 18 bp, synthetic construct
  misc_feature 1..18: note = Artificial sequence related to HLA knockouts in cell therapy
  source 1..18: mol_type = other DNA
ggagtattgggacgggga

SEQ ID NO: 17359 - DNA, 18 bp, synthetic construct
  misc_feature 1..18: note = Artificial sequence related to HLA knockouts in cell therapy
  source 1..18: mol_type = other DNA
gagtattgggacggggag

SEQ ID NO: 17360 - DNA, 18 bp, synthetic construct
  misc_feature 1..18: note = Artificial sequence related to HLA knockouts in cell therapy
  source 1..18: mol_type = other DNA
gtattgggacggggagac

SEQ ID NO: 17361 - DNA, 18 bp, synthetic construct
  misc_feature 1..18: note = Artificial sequence related to HLA knockouts in cell therapy
  source 1..18: mol_type = other DNA
attgggacggggagacac

SEQ ID NO: 17362 - DNA, 18 bp, synthetic construct
  misc_feature 1..18: note = Artificial sequence related to HLA knockouts in cell therapy
  source 1..18: mol_type = other DNA
ttgggacggggagacacg

SEQ ID NO: 17363 - DNA, 18 bp, synthetic construct
  misc_feature 1..18: note = Artificial sequence related to HLA knockouts in cell therapy
  source 1..18: mol_type = other DNA
tgggacggggagacacgg

SEQ ID NO: 17364 - DNA, 18 bp, synthetic construct
  misc_feature 1..18: note = Artificial sequence related to HLA knockouts in cell therapy
  source 1..18: mol_type = other DNA
gggacggggagacacgga

SEQ ID NO: 17365 - DNA, 18 bp, synthetic construct
  misc_feature 1..18: note = Artificial sequence related to HLA knockouts in cell therapy
  source 1..18: mol_type = other DNA
ggacggggagacacggaa

SEQ ID NO: 17366 - DNA, 18 bp, synthetic construct
  misc_feature 1..18: note = Artificial sequence related to HLA knockouts in cell therapy
  source 1..18: mol_type = other DNA
gacggggagacacggaaa

SEQ ID NO: 17367 - DNA, 18 bp, synthetic construct
  misc_feature 1..18: note = Artificial sequence related to HLA knockouts in cell therapy
  source 1..18: mol_type = other DNA
acggggagacacggaaag

SEQ ID NO: 17368 - DNA, 18 bp, synthetic construct
  misc_feature 1..18: note = Artificial sequence related to HLA knockouts in cell therapy
  source 1..18: mol_type = other DNA
cggggagacacggaaagt

SEQ ID NO: 17369 - DNA, 18 bp, synthetic construct
  misc_feature 1..18: note = Artificial sequence related to HLA knockouts in cell therapy
  source 1..18: mol_type = other DNA
ggggagacacggaaagtg

SEQ ID NO: 17370 - DNA, 18 bp, synthetic construct
  misc_feature 1..18: note = Artificial sequence related to HLA knockouts in cell therapy
  source 1..18: mol_type = other DNA
cacggaaagtgaaggccc

SEQ ID NO: 17371 - DNA, 18 bp, synthetic construct
  misc_feature 1..18: note = Artificial sequence related to HLA knockouts in cell therapy
  source 1..18: mol_type = other DNA
cggaaagtgaaggcccac

SEQ ID NO: 17372 - DNA, 18 bp, synthetic construct
  misc_feature 1..18: note = Artificial sequence related to HLA knockouts in cell therapy
  source 1..18: mol_type = other DNA
gtgaaggcccactcacag

SEQ ID NO: 17373 - DNA, 18 bp, synthetic construct
  misc_feature 1..18: note = Artificial sequence related to HLA knockouts in cell therapy
  source 1..18: mol_type = other DNA
gaaggcccactcacagac

SEQ ID NO: 17374 - DNA, 18 bp, synthetic construct
  misc_feature 1..18: note = Artificial sequence related to HLA knockouts in cell therapy
  source 1..18: mol_type = other DNA
aggcccactcacagactc

SEQ ID NO: 17375 - DNA, 18 bp, synthetic construct
  misc_feature 1..18: note = Artificial sequence related to HLA knockouts in cell therapy
  source 1..18: mol_type = other DNA
ggcccactcacagactca

SEQ ID NO: 17376 - DNA, 18 bp, synthetic construct
  misc_feature 1..18: note = Artificial sequence related to HLA knockouts in cell therapy
  source 1..18: mol_type = other DNA
gcccactcacagactcac

SEQ ID NO: 17377 - DNA, 18 bp, synthetic construct
  misc_feature 1..18: note = Artificial sequence related to HLA knockouts in cell therapy
  source 1..18: mol_type = other DNA
cccactcacagactcacc

SEQ ID NO: 17378 - DNA, 18 bp, synthetic construct
  misc_feature 1..18: note = Artificial sequence related to HLA knockouts in cell therapy
  source 1..18: mol_type = other DNA
ccactcacagactcaccg

SEQ ID NO: 17379 - DNA, 18 bp, synthetic construct
  misc_feature 1..18: note = Artificial sequence related to HLA knockouts in cell therapy
  source 1..18: mol_type = other DNA
cacagactcaccgagtgg

SEQ ID NO: 17380 - DNA, 18 bp, synthetic construct
  misc_feature 1..18: note = Artificial sequence related to HLA knockouts in cell therapy
  source 1..18: mol_type = other DNA
cagactcaccgagtggac

SEQ ID NO: 17381 - DNA, 18 bp, synthetic construct
  misc_feature 1..18: note = Artificial sequence related to HLA knockouts in cell therapy
  source 1..18: mol_type = other DNA
agactcaccgagtggacc

SEQ ID NO: 17382 - DNA, 18 bp, synthetic construct
  misc_feature 1..18: note = Artificial sequence related to HLA knockouts in cell therapy
  source 1..18: mol_type = other DNA
gactcaccgagtggacct

SEQ ID NO: 17383 - DNA, 18 bp, synthetic construct
  misc_feature 1..18: note = Artificial sequence related to HLA knockouts in cell therapy
  source 1..18: mol_type = other DNA
actcaccgagtggacctg

SEQ ID NO: 17384 - DNA, 18 bp, synthetic construct
  misc_feature 1..18: note = Artificial sequence related to HLA knockouts in cell therapy
  source 1..18: mol_type = other DNA
ctcaccgagtggacctgg

SEQ ID NO: 17385 - DNA, 18 bp, synthetic construct
  misc_feature 1..18: note = Artificial sequence related to HLA knockouts in cell therapy
  source 1..18: mol_type = other DNA
tcaccgagtggacctggg

SEQ ID NO: 17386 - DNA, 18 bp, synthetic construct
  misc_feature 1..18: note = Artificial sequence related to HLA knockouts in cell therapy
  source 1..18: mol_type = other DNA
caccgagtggacctgggg

SEQ ID NO: 17387 - DNA, 18 bp, synthetic construct
  misc_feature 1..18: note = Artificial sequence related to HLA knockouts in cell therapy
  source 1..18: mol_type = other DNA
accgagtggacctgggga

SEQ ID NO: 17388 - DNA, 18 bp, synthetic construct
  misc_feature 1..18: note = Artificial sequence related to HLA knockouts in cell therapy
  source 1..18: mol_type = other DNA
ccgagtggacctggggac

SEQ ID NO: 17389 - DNA, 18 bp, synthetic construct
  misc_feature 1..18: note = Artificial sequence related to HLA knockouts in cell therapy
  source 1..18: mol_type = other DNA
cgagtggacctggggacc

SEQ ID NO: 17390 - DNA, 18 bp, synthetic construct
  misc_feature 1..18: note = Artificial sequence related to HLA knockouts in cell therapy
  source 1..18: mol_type = other DNA
gagtggacctggggaccc

SEQ ID NO: 17391 - DNA, 18 bp, synthetic construct
  misc_feature 1..18: note = Artificial sequence related to HLA knockouts in cell therapy
  source 1..18: mol_type = other DNA
agtggacctggggaccct

SEQ ID NO: 17392 - DNA, 18 bp, synthetic construct
  misc_feature 1..18: note = Artificial sequence related to HLA knockouts in cell therapy
  source 1..18: mol_type = other DNA
gtggacctggggaccctg

SEQ ID NO: 17393 - DNA, 18 bp, synthetic construct
  misc_feature 1..18: note = Artificial sequence related to HLA knockouts in cell therapy
  source 1..18: mol_type = other DNA
tggacctggggaccctgc

SEQ ID NO: 17394 - DNA, 18 bp, synthetic construct
  misc_feature 1..18: note = Artificial sequence related to HLA knockouts in cell therapy
  source 1..18: mol_type = other DNA
ggacctggggaccctgcg

SEQ ID NO: 17395 - DNA, 18 bp, synthetic construct
  misc_feature 1..18: note = Artificial sequence related to HLA knockouts in cell therapy
  source 1..18: mol_type = other DNA
gacctggggaccctgcgc

SEQ ID NO: 17396 - DNA, 18 bp, synthetic construct
  misc_feature 1..18: note = Artificial sequence related to HLA knockouts in cell therapy
  source 1..18: mol_type = other DNA
acctggggaccctgcgcg

SEQ ID NO: 17397 - DNA, 18 bp, synthetic construct
  misc_feature 1..18: note = Artificial sequence related to HLA knockouts in cell therapy
  source 1..18: mol_type = other DNA
cctggggaccctgcgcgg

SEQ ID NO: 17398 - DNA, 18 bp, synthetic construct
  misc_feature 1..18: note = Artificial sequence related to HLA knockouts in cell therapy
  source 1..18: mol_type = other DNA
ctggggaccctgcgcggc

SEQ ID NO: 17399 - DNA, 18 bp, synthetic construct
  misc_feature 1..18: note = Artificial sequence related to HLA knockouts in cell therapy
  source 1..18: mol_type = other DNA
tggggaccctgcgcggct

SEQ ID NO: 17400 - DNA, 18 bp, synthetic construct
  misc_feature 1..18: note = Artificial sequence related to HLA knockouts in cell therapy
  source 1..18: mol_type = other DNA
ggggaccctgcgcggcta

SEQ ID NO: 17401 - DNA, 18 bp, synthetic construct
  misc_feature 1..18: note = Artificial sequence related to HLA knockouts in cell therapy
  source 1..18: mol_type = other DNA
gggaccctgcgcggctac

SEQ ID NO: 17402 - DNA, 18 bp, synthetic construct
  misc_feature 1..18: note = Artificial sequence related to HLA knockouts in cell therapy
  source 1..18: mol_type = other DNA
ggaccctgcgcggctact

SEQ ID NO: 17403 - DNA, 18 bp, synthetic construct
  misc_feature 1..18: note = Artificial sequence related to HLA knockouts in cell therapy
  source 1..18: mol_type = other DNA
gaccctgcgcggctacta

SEQ ID NO: 17404 - DNA, 18 bp, synthetic construct
  misc_feature 1..18: note = Artificial sequence related to HLA knockouts in cell therapy
  source 1..18: mol_type = other DNA
accctgcgcggctactac

SEQ ID NO: 17405 - DNA, 18 bp, synthetic construct
  misc_feature 1..18: note = Artificial sequence related to HLA knockouts in cell therapy
  source 1..18: mol_type = other DNA
ccctgcgcggctactaca

SEQ ID NO: 17406 - DNA, 18 bp, synthetic construct
  misc_feature 1..18: note = Artificial sequence related to HLA knockouts in cell therapy
  source 1..18: mol_type = other DNA
cctgcgcggctactacaa

SEQ ID NO: 17407 - DNA, 18 bp, synthetic construct
  misc_feature 1..18: note = Artificial sequence related to HLA knockouts in cell therapy
  source 1..18: mol_type = other DNA
ctgcgcggctactacaac

SEQ ID NO: 17408 - DNA, 18 bp, synthetic construct
  misc_feature 1..18: note = Artificial sequence related to HLA knockouts in cell therapy
  source 1..18: mol_type = other DNA
tgcgcggctactacaacc

SEQ ID NO: 17409 - DNA, 18 bp, synthetic construct
  misc_feature 1..18: note = Artificial sequence related to HLA knockouts in cell therapy
  source 1..18: mol_type = other DNA
gcgcggctactacaacca

SEQ ID NO: 17410 - DNA, 18 bp, synthetic construct
  misc_feature 1..18: note = Artificial sequence related to HLA knockouts in cell therapy
  source 1..18: mol_type = other DNA
cgcggctactacaaccag

SEQ ID NO: 17411 - DNA, 18 bp, synthetic construct
  misc_feature 1..18: note = Artificial sequence related to HLA knockouts in cell therapy
  source 1..18: mol_type = other DNA
ctacaaccagagcgaggc

SEQ ID NO: 17412 - DNA, 18 bp, synthetic construct
  misc_feature 1..18: note = Artificial sequence related to HLA knockouts in cell therapy
  source 1..18: mol_type = other DNA
tacaaccagagcgaggcc

SEQ ID NO: 17413 - DNA, 18 bp, synthetic construct
  misc_feature 1..18: note = Artificial sequence related to HLA knockouts in cell therapy
  source 1..18: mol_type = other DNA
acaaccagagcgaggccg

SEQ ID NO: 17414 - DNA, 18 bp, synthetic construct
  misc_feature 1..18: note = Artificial sequence related to HLA knockouts in cell therapy
  source 1..18: mol_type = other DNA
caaccagagcgaggccgg

SEQ ID NO: 17415 - DNA, 18 bp, synthetic construct
  misc_feature 1..18: note = Artificial sequence related to HLA knockouts in cell therapy
  source 1..18: mol_type = other DNA
aaccagagcgaggccggt

SEQ ID NO: 17416 - DNA, 18 bp, synthetic construct
  misc_feature 1..18: note = Artificial sequence related to HLA knockouts in cell therapy
  source 1..18: mol_type = other DNA
accagagcgaggccggtt

SEQ ID NO: 17417 - DNA, 18 bp, synthetic construct
  misc_feature 1..18: note = Artificial sequence related to HLA knockouts in cell therapy
  source 1..18: mol_type = other DNA
ccagagcgaggccggttc

SEQ ID NO: 17418 - DNA, 18 bp, synthetic construct
  misc_feature 1..18: note = Artificial sequence related to HLA knockouts in cell therapy
  source 1..18: mol_type = other DNA
cagagcgaggccggttct

SEQ ID NO: 17419 - DNA, 18 bp, synthetic construct
  misc_feature 1..18: note = Artificial sequence related to HLA knockouts in cell therapy
  source 1..18: mol_type = other DNA
agagcgaggccggttctc

SEQ ID NO: 17420 - DNA, 18 bp, synthetic construct
  misc_feature 1..18: note = Artificial sequence related to HLA knockouts in cell therapy
  source 1..18: mol_type = other DNA
gagcgaggccggttctca

SEQ ID NO: 17421 - DNA, 18 bp, synthetic construct
  misc_feature 1..18: note = Artificial sequence related to HLA knockouts in cell therapy
  source 1..18: mol_type = other DNA
agcgaggccggttctcac

SEQ ID NO: 17422 - DNA, 18 bp, synthetic construct
  misc_feature 1..18: note = Artificial sequence related to HLA knockouts in cell therapy
  source 1..18: mol_type = other DNA
gcgaggccggttctcaca

SEQ ID NO: 17423 - DNA, 18 bp, synthetic construct
  misc_feature 1..18: note = Artificial sequence related to HLA knockouts in cell therapy
  source 1..18: mol_type = other DNA
cgaggccggttctcacac

SEQ ID NO: 17424 - DNA, 18 bp, synthetic construct
  misc_feature 1..18: note = Artificial sequence related to HLA knockouts in cell therapy
  source 1..18: mol_type = other DNA
gaggccggttctcacacc

SEQ ID NO: 17425 - DNA, 18 bp, synthetic construct
  misc_feature 1..18: note = Artificial sequence related to HLA knockouts in cell therapy
  source 1..18: mol_type = other DNA
aggccggttctcacaccg

SEQ ID NO: 17426 - DNA, 18 bp, synthetic construct
  misc_feature 1..18: note = Artificial sequence related to HLA knockouts in cell therapy
  source 1..18: mol_type = other DNA
ggccggttctcacaccgt

SEQ ID NO: 17427 - DNA, 18 bp, synthetic construct
  misc_feature 1..18: note = Artificial sequence related to HLA knockouts in cell therapy
  source 1..18: mol_type = other DNA
gccggttctcacaccgtc

SEQ ID NO: 17428 - DNA, 18 bp, synthetic construct
  misc_feature 1..18: note = Artificial sequence related to HLA knockouts in cell therapy
  source 1..18: mol_type = other DNA
ccggttctcacaccgtcc

SEQ ID NO: 17429 - DNA, 18 bp, synthetic construct
  misc_feature 1..18: note = Artificial sequence related to HLA knockouts in cell therapy
  source 1..18: mol_type = other DNA
cggttctcacaccgtcca

SEQ ID NO: 17430 - DNA, 18 bp, synthetic construct
  misc_feature 1..18: note = Artificial sequence related to HLA knockouts in cell therapy
  source 1..18: mol_type = other DNA
ggttctcacaccgtccag

SEQ ID NO: 17431 - DNA, 18 bp, synthetic construct
  misc_feature 1..18: note = Artificial sequence related to HLA knockouts in cell therapy
  source 1..18: mol_type = other DNA
tctcacaccgtccagagg

SEQ ID NO: 17432 - DNA, 18 bp, synthetic construct
  misc_feature 1..18: note = Artificial sequence related to HLA knockouts in cell therapy
  source 1..18: mol_type = other DNA
ctcacaccgtccagagga

SEQ ID NO: 17433 - DNA, 18 bp, synthetic construct
  misc_feature 1..18: note = Artificial sequence related to HLA knockouts in cell therapy
  source 1..18: mol_type = other DNA
cacaccgtccagaggatg

SEQ ID NO: 17434 - DNA, 18 bp, synthetic construct
  misc_feature 1..18: note = Artificial sequence related to HLA knockouts in cell therapy
  source 1..18: mol_type = other DNA
ggatgtatggctgcgacg

SEQ ID NO: 17435 - DNA, 18 bp, synthetic construct
  misc_feature 1..18: note = Artificial sequence related to HLA knockouts in cell therapy
  source 1..18: mol_type = other DNA
tgtatggctgcgacgtgg

SEQ ID NO: 17436 - DNA, 18 bp, synthetic construct
  misc_feature 1..18: note = Artificial sequence related to HLA knockouts in cell therapy
  source 1..18: mol_type = other DNA
gtatggctgcgacgtggg

SEQ ID NO: 17437 - DNA, 18 bp, synthetic construct
  misc_feature 1..18: note = Artificial sequence related to HLA knockouts in cell therapy
  source 1..18: mol_type = other DNA
tatggctgcgacgtgggg

SEQ ID NO: 17438 - DNA, 18 bp, synthetic construct
  misc_feature 1..18: note = Artificial sequence related to HLA knockouts in cell therapy
  source 1..18: mol_type = other DNA
atggctgcgacgtggggt

SEQ ID NO: 17439 - DNA, 18 bp, synthetic construct
  misc_feature 1..18: note = Artificial sequence related to HLA knockouts in cell therapy
  source 1..18: mol_type = other DNA
tggctgcgacgtggggtc

SEQ ID NO: 17440 - DNA, 18 bp, synthetic construct
  misc_feature 1..18: note = Artificial sequence related to HLA knockouts in cell therapy
  source 1..18: mol_type = other DNA
ggctgcgacgtggggtcg

SEQ ID NO: 17441 - DNA, 18 bp, synthetic construct
  misc_feature 1..18: note = Artificial sequence related to HLA knockouts in cell therapy
  source 1..18: mol_type = other DNA
gctgcgacgtggggtcgg

SEQ ID NO: 17442 - DNA, 18 bp, synthetic construct
  misc_feature 1..18: note = Artificial sequence related to HLA knockouts in cell therapy
  source 1..18: mol_type = other DNA
ctgcgacgtggggtcgga

SEQ ID NO: 17443 - DNA, 18 bp, synthetic construct
  misc_feature 1..18: note = Artificial sequence related to HLA knockouts in cell therapy
  source 1..18: mol_type = other DNA
tgcgacgtggggtcggac

SEQ ID NO: 17444 - DNA, 18 bp, synthetic construct
  misc_feature 1..18: note = Artificial sequence related to HLA knockouts in cell therapy
  source 1..18: mol_type = other DNA
gcgacgtggggtcggact

SEQ ID NO: 17445 - DNA, 18 bp, synthetic construct
  misc_feature 1..18: note = Artificial sequence related to HLA knockouts in cell therapy
  source 1..18: mol_type = other DNA
cgacgtggggtcggactg

SEQ ID NO: 17446 - DNA, 18 bp, synthetic construct
  misc_feature 1..18: note = Artificial sequence related to HLA knockouts in cell therapy
  source 1..18: mol_type = other DNA
gacgtggggtcggactgg

SEQ ID NO: 17447 - DNA, 18 bp, synthetic construct
  misc_feature 1..18: note = Artificial sequence related to HLA knockouts in cell therapy
  source 1..18: mol_type = other DNA
acgtggggtcggactggc

SEQ ID NO: 17448 - DNA, 18 bp, synthetic construct
  misc_feature 1..18: note = Artificial sequence related to HLA knockouts in cell therapy
  source 1..18: mol_type = other DNA
cgtggggtcggactggcg

SEQ ID NO: 17449 - DNA, 18 bp, synthetic construct
  misc_feature 1..18: note = Artificial sequence related to HLA knockouts in cell therapy
  source 1..18: mol_type = other DNA
gtggggtcggactggcgc

SEQ ID NO: 17450 - DNA, 18 bp, synthetic construct
  misc_feature 1..18: note = Artificial sequence related to HLA knockouts in cell therapy
  source 1..18: mol_type = other DNA
tggggtcggactggcgct

SEQ ID NO: 17451 - DNA, 18 bp, synthetic construct
  misc_feature 1..18: note = Artificial sequence related to HLA knockouts in cell therapy
  source 1..18: mol_type = other DNA
ggggtcggactggcgctt

SEQ ID NO: 17452 - DNA, 18 bp, synthetic construct
  misc_feature 1..18: note = Artificial sequence related to HLA knockouts in cell therapy
  source 1..18: mol_type = other DNA
gggtcggactggcgcttc

SEQ ID NO: 17453 - DNA, 18 bp, synthetic construct
  misc_feature 1..18: note = Artificial sequence related to HLA knockouts in cell therapy
  source 1..18: mol_type = other DNA
ggtcggactggcgcttcc

SEQ ID NO: 17454 - DNA, 18 bp, synthetic construct
  misc_feature 1..18: note = Artificial sequence related to HLA knockouts in cell therapy
  source 1..18: mol_type = other DNA
gtcggactggcgcttcct

SEQ ID NO: 17455 - DNA, 18 bp, synthetic construct
  misc_feature 1..18: note = Artificial sequence related to HLA knockouts in cell therapy
  source 1..18: mol_type = other DNA
tcggactggcgcttcctc

SEQ ID NO: 17456 - DNA, 18 bp, synthetic construct
  misc_feature 1..18: note = Artificial sequence related to HLA knockouts in cell therapy
  source 1..18: mol_type = other DNA
cggactggcgcttcctcc

SEQ ID NO: 17457 - DNA, 18 bp, synthetic construct
  misc_feature 1..18: note = Artificial sequence related to HLA knockouts in cell therapy
  source 1..18: mol_type = other DNA
ggactggcgcttcctccg

SEQ ID NO: 17458 - DNA, 18 bp, synthetic construct
  misc_feature 1..18: note = Artificial sequence related to HLA knockouts in cell therapy
  source 1..18: mol_type = other DNA
gactggcgcttcctccgc

SEQ ID NO: 17459 - DNA, 18 bp, synthetic construct
  misc_feature 1..18: note = Artificial sequence related to HLA knockouts in cell therapy
  source 1..18: mol_type = other DNA
actggcgcttcctccgcg

SEQ ID NO: 17460 - DNA, 18 bp, synthetic construct
  misc_feature 1..18: note = Artificial sequence related to HLA knockouts in cell therapy
  source 1..18: mol_type = other DNA
ctggcgcttcctccgcgg

SEQ ID NO: 17461 - DNA, 18 bp, synthetic construct
  misc_feature 1..18: note = Artificial sequence related to HLA knockouts in cell therapy
  source 1..18: mol_type = other DNA
tggcgcttcctccgcggg

SEQ ID NO: 17462 - DNA, 18 bp, synthetic construct
  misc_feature 1..18: note = Artificial sequence related to HLA knockouts in cell therapy
  source 1..18: mol_type = other DNA
ggcgcttcctccgcgggt

SEQ ID NO: 17463 - DNA, 18 bp, synthetic construct
  misc_feature 1..18: note = Artificial sequence related to HLA knockouts in cell therapy
  source 1..18: mol_type = other DNA
gcgcttcctccgcgggta

SEQ ID NO: 17464 - DNA, 18 bp, synthetic construct
  misc_feature 1..18: note = Artificial sequence related to HLA knockouts in cell therapy
  source 1..18: mol_type = other DNA
cgcttcctccgcgggtac

SEQ ID NO: 17465 - DNA, 18 bp, synthetic construct
  misc_feature 1..18: note = Artificial sequence related to HLA knockouts in cell therapy
  source 1..18: mol_type = other DNA
gcttcctccgcgggtacc

SEQ ID NO: 17466 - DNA, 18 bp, synthetic construct
  misc_feature 1..18: note = Artificial sequence related to HLA knockouts in cell therapy
  source 1..18: mol_type = other DNA
cttcctccgcgggtacca

SEQ ID NO: 17467 - DNA, 18 bp, synthetic construct
  misc_feature 1..18: note = Artificial sequence related to HLA knockouts in cell therapy
  source 1..18: mol_type = other DNA
ttcctccgcgggtaccac

SEQ ID NO: 17468 - DNA, 18 bp, synthetic construct
  misc_feature 1..18: note = Artificial sequence related to HLA knockouts in cell therapy
  source 1..18: mol_type = other DNA
tcctccgcgggtaccacc

SEQ ID NO: 17469 - DNA, 18 bp, synthetic construct
  misc_feature 1..18: note = Artificial sequence related to HLA knockouts in cell therapy
  source 1..18: mol_type = other DNA
cctccgcgggtaccacca

SEQ ID NO: 17470 - DNA, 18 bp, synthetic construct
  misc_feature 1..18: note = Artificial sequence related to HLA knockouts in cell therapy
  source 1..18: mol_type = other DNA
ctccgcgggtaccaccag

SEQ ID NO: 17471 - DNA, 18 bp, synthetic construct
  misc_feature 1..18: note = Artificial sequence related to HLA knockouts in cell therapy
  source 1..18: mol_type = other DNA
tccgcgggtaccaccagt

SEQ ID NO: 17472 - DNA, 18 bp, synthetic construct
  misc_feature 1..18: note = Artificial sequence related to HLA knockouts in cell therapy
  source 1..18: mol_type = other DNA
ccgcgggtaccaccagta

SEQ ID NO: 17473 - DNA, 18 bp, synthetic construct
  misc_feature 1..18: note = Artificial sequence related to HLA knockouts in cell therapy
  source 1..18: mol_type = other DNA
cgcgggtaccaccagtac

SEQ ID NO: 17474 - DNA, 18 bp, synthetic construct
  misc_feature 1..18: note = Artificial sequence related to HLA knockouts in cell therapy
  source 1..18: mol_type = other DNA
gcgggtaccaccagtacg

SEQ ID NO: 17475 - DNA, 18 bp, synthetic construct
  misc_feature 1..18: note = Artificial sequence related to HLA knockouts in cell therapy
  source 1..18: mol_type = other DNA
cgggtaccaccagtacgc

SEQ ID NO: 17476 - DNA, 18 bp, synthetic construct
  misc_feature 1..18: note = Artificial sequence related to HLA knockouts in cell therapy
  source 1..18: mol_type = other DNA
gggtaccaccagtacgcc

SEQ ID NO: 17477 - DNA, 18 bp, synthetic construct
  misc_feature 1..18: note = Artificial sequence related to HLA knockouts in cell therapy
  source 1..18: mol_type = other DNA
ggtaccaccagtacgcct

SEQ ID NO: 17478 - DNA, 18 bp, synthetic construct
  misc_feature 1..18: note = Artificial sequence related to HLA knockouts in cell therapy
  source 1..18: mol_type = other DNA
accaccagtacgcctacg

SEQ ID NO: 17479 - DNA, 18 bp, synthetic construct
  misc_feature 1..18: note = Artificial sequence related to HLA knockouts in cell therapy
  source 1..18: mol_type = other DNA
ccaccagtacgcctacga

SEQ ID NO: 17480 - DNA, 18 bp, synthetic construct
  misc_feature 1..18: note = Artificial sequence related to HLA knockouts in cell therapy
  source 1..18: mol_type = other DNA
caccagtacgcctacgac

SEQ ID NO: 17481 - DNA, 18 bp, synthetic construct
  misc_feature 1..18: note = Artificial sequence related to HLA knockouts in cell therapy
  source 1..18: mol_type = other DNA
accagtacgcctacgacg

SEQ ID NO: 17482 - DNA, 18 bp, synthetic construct
  misc_feature 1..18: note = Artificial sequence related to HLA knockouts in cell therapy
  source 1..18: mol_type = other DNA
ccagtacgcctacgacgg

SEQ ID NO: 17483 - DNA, 18 bp, synthetic construct
  misc_feature 1..18: note = Artificial sequence related to HLA knockouts in cell therapy
  source 1..18: mol_type = other DNA
cagtacgcctacgacggc

SEQ ID NO: 17484 - DNA, 18 bp, synthetic construct
  misc_feature 1..18: note = Artificial sequence related to HLA knockouts in cell therapy
  source 1..18: mol_type = other DNA
agtacgcctacgacggca

SEQ ID NO: 17485 - DNA, 18 bp, synthetic construct
  misc_feature 1..18: note = Artificial sequence related to HLA knockouts in cell therapy
  source 1..18: mol_type = other DNA
gtacgcctacgacggcaa

SEQ ID NO: 17486 - DNA, 18 bp, synthetic construct
  misc_feature 1..18: note = Artificial sequence related to HLA knockouts in cell therapy
  source 1..18: mol_type = other DNA
tacgcctacgacggcaag

SEQ ID NO: 17487 - DNA, 18 bp, synthetic construct
  misc_feature 1..18: note = Artificial sequence related to HLA knockouts in cell therapy
  source 1..18: mol_type = other DNA
acgcctacgacggcaagg

SEQ ID NO: 17488 - DNA, 18 bp, synthetic construct
  misc_feature 1..18: note = Artificial sequence related to HLA knockouts in cell therapy
  source 1..18: mol_type = other DNA
cgcctacgacggcaagga

SEQ ID NO: 17489 - DNA, 18 bp, synthetic construct
  misc_feature 1..18: note = Artificial sequence related to HLA knockouts in cell therapy
  source 1..18: mol_type = other DNA
gcctacgacggcaaggat

SEQ ID NO: 17490 - DNA, 18 bp, synthetic construct
  misc_feature 1..18: note = Artificial sequence related to HLA knockouts in cell therapy
  source 1..18: mol_type = other DNA
tcgccctgaaagaggacc

SEQ ID NO: 17491 - DNA, 18 bp, synthetic construct
  misc_feature 1..18: note = Artificial sequence related to HLA knockouts in cell therapy
  source 1..18: mol_type = other DNA
cgccctgaaagaggacct

SEQ ID NO: 17492 - DNA, 18 bp, synthetic construct
  misc_feature 1..18: note = Artificial sequence related to HLA knockouts in cell therapy
  source 1..18: mol_type = other DNA
gccctgaaagaggacctg

SEQ ID NO: 17493 - DNA, 18 bp, synthetic construct
  misc_feature 1..18: note = Artificial sequence related to HLA knockouts in cell therapy
  source 1..18: mol_type = other DNA
ccctgaaagaggacctgc

SEQ ID NO: 17494 - DNA, 18 bp, synthetic construct
  misc_feature 1..18: note = Artificial sequence related to HLA knockouts in cell therapy
  source 1..18: mol_type = other DNA
cctgaaagaggacctgcg

SEQ ID NO: 17495 - DNA, 18 bp, synthetic construct
  misc_feature 1..18: note = Artificial sequence related to HLA knockouts in cell therapy
  source 1..18: mol_type = other DNA
ctgaaagaggacctgcgc

SEQ ID NO: 17496 - DNA, 18 bp, synthetic construct
  misc_feature 1..18: note = Artificial sequence related to HLA knockouts in cell therapy
  source 1..18: mol_type = other DNA
gaaagaggacctgcgctc

SEQ ID NO: 17497 - DNA, 18 bp, synthetic construct
  misc_feature 1..18: note = Artificial sequence related to HLA knockouts in cell therapy
  source 1..18: mol_type = other DNA
agaggacctgcgctcttg

SEQ ID NO: 17498 - DNA, 18 bp, synthetic construct
  misc_feature 1..18: note = Artificial sequence related to HLA knockouts in cell therapy
  source 1..18: mol_type = other DNA
gaggacctgcgctcttgg

SEQ ID NO: 17499 - DNA, 18 bp, synthetic construct
  misc_feature 1..18: note = Artificial sequence related to HLA knockouts in cell therapy
  source 1..18: mol_type = other DNA
aggacctgcgctcttgga

SEQ ID NO: 17500 - DNA, 18 bp, synthetic construct
  misc_feature 1..18: note = Artificial sequence related to HLA knockouts in cell therapy
  source 1..18: mol_type = other DNA
ggacctgcgctcttggac

SEQ ID NO: 17501 - DNA, 18 bp, synthetic construct
  misc_feature 1..18: note = Artificial sequence related to HLA knockouts in cell therapy
  source 1..18: mol_type = other DNA
gacctgcgctcttggacc

SEQ ID NO: 17502 - DNA, 18 bp, synthetic construct
  misc_feature 1..18: note = Artificial sequence related to HLA knockouts in cell therapy
  source 1..18: mol_type = other DNA
acctgcgctcttggaccg

SEQ ID NO: 17503 - DNA, 18 bp, synthetic construct
  misc_feature 1..18: note = Artificial sequence related to HLA knockouts in cell therapy
  source 1..18: mol_type = other DNA
cctgcgctcttggaccgc

SEQ ID NO: 17504 - DNA, 18 bp, synthetic construct
  misc_feature 1..18: note = Artificial sequence related to HLA knockouts in cell therapy
  source 1..18: mol_type = other DNA
ctgcgctcttggaccgcg

SEQ ID NO: 17505 - DNA, 18 bp, synthetic construct
  misc_feature 1..18: note = Artificial sequence related to HLA knockouts in cell therapy
  source 1..18: mol_type = other DNA
tgcgctcttggaccgcgg

SEQ ID NO: 17506 - DNA, 18 bp, synthetic construct
  misc_feature 1..18: note = Artificial sequence related to HLA knockouts in cell therapy
  source 1..18: mol_type = other DNA
gcgctcttggaccgcggc

SEQ ID NO: 17507 - DNA, 18 bp, synthetic construct
  misc_feature 1..18: note = Artificial sequence related to HLA knockouts in cell therapy
  source 1..18: mol_type = other DNA
cgctcttggaccgcggcg

SEQ ID NO: 17508 - DNA, 18 bp, synthetic construct
  misc_feature 1..18: note = Artificial sequence related to HLA knockouts in cell therapy
  source 1..18: mol_type = other DNA
gctcttggaccgcggcgg

SEQ ID NO: 17509 - DNA, 18 bp, synthetic construct
  misc_feature 1..18: note = Artificial sequence related to HLA knockouts in cell therapy
  source 1..18: mol_type = other DNA
ctcttggaccgcggcgga

SEQ ID NO: 17510 - DNA, 18 bp, synthetic construct
  misc_feature 1..18: note = Artificial sequence related to HLA knockouts in cell therapy
  source 1..18: mol_type = other DNA
tcttggaccgcggcggac

SEQ ID NO: 17511 - DNA, 18 bp, synthetic construct
  misc_feature 1..18: note = Artificial sequence related to HLA knockouts in cell therapy
  source 1..18: mol_type = other DNA
cttggaccgcggcggaca

SEQ ID NO: 17512 - DNA, 18 bp, synthetic construct
  misc_feature 1..18: note = Artificial sequence related to HLA knockouts in cell therapy
  source 1..18: mol_type = other DNA
ttggaccgcggcggacat

SEQ ID NO: 17513 - DNA, 18 bp, synthetic construct
  misc_feature 1..18: note = Artificial sequence related to HLA knockouts in cell therapy
  source 1..18: mol_type = other DNA
tggaccgcggcggacatg

SEQ ID NO: 17514 - DNA, 18 bp, synthetic construct
  misc_feature 1..18: note = Artificial sequence related to HLA knockouts in cell therapy
  source 1..18: mol_type = other DNA
ggaccgcggcggacatgg

SEQ ID NO: 17515 - DNA, 18 bp, synthetic construct
  misc_feature 1..18: note = Artificial sequence related to HLA knockouts in cell therapy
  source 1..18: mol_type = other DNA
gaccgcggcggacatggc

SEQ ID NO: 17516 - DNA, 18 bp, synthetic construct
  misc_feature 1..18: note = Artificial sequence related to HLA knockouts in cell therapy
  source 1..18: mol_type = other DNA
accgcggcggacatggca

SEQ ID NO: 17517 - DNA, 18 bp, synthetic construct
  misc_feature 1..18: note = Artificial sequence related to HLA knockouts in cell therapy
  source 1..18: mol_type = other DNA
ccgcggcggacatggcag

SEQ ID NO: 17518 - DNA, 18 bp, synthetic construct
  misc_feature 1..18: note = Artificial sequence related to HLA knockouts in cell therapy
  source 1..18: mol_type = other DNA
cgcggcggacatggcagc

SEQ ID NO: 17519 - DNA, 18 bp, synthetic construct
  misc_feature 1..18: note = Artificial sequence related to HLA knockouts in cell therapy
  source 1..18: mol_type = other DNA
gcggcggacatggcagct

SEQ ID NO: 17520 - DNA, 18 bp, synthetic construct
  misc_feature 1..18: note = Artificial sequence related to HLA knockouts in cell therapy
  source 1..18: mol_type = other DNA
cggcggacatggcagctc

SEQ ID NO: 17521 - DNA, 18 bp, synthetic construct
  misc_feature 1..18: note = Artificial sequence related to HLA knockouts in cell therapy
  source 1..18: mol_type = other DNA
ggcggacatggcagctca

SEQ ID NO: 17522 - DNA, 18 bp, synthetic construct
  misc_feature 1..18: note = Artificial sequence related to HLA knockouts in cell therapy
  source 1..18: mol_type = other DNA
gcggacatggcagctcag

SEQ ID NO: 17523 - DNA, 18 bp, synthetic construct
  misc_feature 1..18: note = Artificial sequence related to HLA knockouts in cell therapy
  source 1..18: mol_type = other DNA
cggacatggcagctcaga

SEQ ID NO: 17524 - DNA, 18 bp, synthetic construct
  misc_feature 1..18: note = Artificial sequence related to HLA knockouts in cell therapy
  source 1..18: mol_type = other DNA
ggacatggcagctcagac

SEQ ID NO: 17525 - DNA, 18 bp, synthetic construct
  misc_feature 1..18: note = Artificial sequence related to HLA knockouts in cell therapy
  source 1..18: mol_type = other DNA
gacatggcagctcagacc

SEQ ID NO: 17526 - DNA, 18 bp, synthetic construct
  misc_feature 1..18: note = Artificial sequence related to HLA knockouts in cell therapy
  source 1..18: mol_type = other DNA
catggcagctcagaccac

SEQ ID NO: 17527 - DNA, 18 bp, synthetic construct
  misc_feature 1..18: note = Artificial sequence related to HLA knockouts in cell therapy
  source 1..18: mol_type = other DNA
atggcagctcagaccacc

SEQ ID NO: 17528 - DNA, 18 bp, synthetic construct
  misc_feature 1..18: note = Artificial sequence related to HLA knockouts in cell therapy
  source 1..18: mol_type = other DNA
tggcagctcagaccacca

SEQ ID NO: 17529 - DNA, 18 bp, synthetic construct
  misc_feature 1..18: note = Artificial sequence related to HLA knockouts in cell therapy
  source 1..18: mol_type = other DNA
ggcagctcagaccaccaa

SEQ ID NO: 17530 - DNA, 18 bp, synthetic construct
  misc_feature 1..18: note = Artificial sequence related to HLA knockouts in cell therapy
  source 1..18: mol_type = other DNA
gcagctcagaccaccaag

SEQ ID NO: 17531 - DNA, 18 bp, synthetic construct
  misc_feature 1..18: note = Artificial sequence related to HLA knockouts in cell therapy
  source 1..18: mol_type = other DNA
cagctcagaccaccaagc

SEQ ID NO: 17532 - DNA, 18 bp, synthetic construct
  misc_feature 1..18: note = Artificial sequence related to HLA knockouts in cell therapy
  source 1..18: mol_type = other DNA
gctcagaccaccaagcac

SEQ ID NO: 17533 - DNA, 18 bp, synthetic construct
  misc_feature 1..18: note = Artificial sequence related to HLA knockouts in cell therapy
  source 1..18: mol_type = other DNA
ccaccaagcacaagtggg

SEQ ID NO: 17534 - DNA, 18 bp, synthetic construct
  misc_feature 1..18: note = Artificial sequence related to HLA knockouts in cell therapy
  source 1..18: mol_type = other DNA
ccaagcacaagtgggagg

SEQ ID NO: 17535 - DNA, 18 bp, synthetic construct
  misc_feature 1..18: note = Artificial sequence related to HLA knockouts in cell therapy
  source 1..18: mol_type = other DNA
caagcacaagtgggaggc

SEQ ID NO: 17536 - DNA, 18 bp, synthetic construct
  misc_feature 1..18: note = Artificial sequence related to HLA knockouts in cell therapy
  source 1..18: mol_type = other DNA
aagcacaagtgggaggcg

SEQ ID NO: 17537 - DNA, 18 bp, synthetic construct
  misc_feature 1..18: note = Artificial sequence related to HLA knockouts in cell therapy
  source 1..18: mol_type = other DNA
agcacaagtgggaggcgg

SEQ ID NO: 17538 - DNA, 18 bp, synthetic construct
  misc_feature 1..18: note = Artificial sequence related to HLA knockouts in cell therapy
  source 1..18: mol_type = other DNA
gcacaagtgggaggcggc

SEQ ID NO: 17539 - DNA, 18 bp, synthetic construct
  misc_feature 1..18: note = Artificial sequence related to HLA knockouts in cell therapy
  source 1..18: mol_type = other DNA
cacaagtgggaggcggcc

SEQ ID NO: 17540 - DNA, 18 bp, synthetic construct
  misc_feature 1..18: note = Artificial sequence related to HLA knockouts in cell therapy
  source 1..18: mol_type = other DNA
acaagtgggaggcggccc

SEQ ID NO: 17541 - DNA, 18 bp, synthetic construct
  misc_feature 1..18: note = Artificial sequence related to HLA knockouts in cell therapy
  source 1..18: mol_type = other DNA
caagtgggaggcggccca

SEQ ID NO: 17542 - DNA, 18 bp, synthetic construct
  misc_feature 1..18: note = Artificial sequence related to HLA knockouts in cell therapy
  source 1..18: mol_type = other DNA
aagtgggaggcggcccat

SEQ ID NO: 17543 - DNA, 18 bp, synthetic construct
  misc_feature 1..18: note = Artificial sequence related to HLA knockouts in cell therapy
  source 1..18: mol_type = other DNA
agtgggaggcggcccatg

SEQ ID NO: 17544 - DNA, 18 bp, synthetic construct
  misc_feature 1..18: note = Artificial sequence related to HLA knockouts in cell therapy
  source 1..18: mol_type = other DNA
gtgggaggcggcccatgt

SEQ ID NO: 17545 - DNA, 18 bp, synthetic construct
  misc_feature 1..18: note = Artificial sequence related to HLA knockouts in cell therapy
  source 1..18: mol_type = other DNA
tgggaggcggcccatgtg

SEQ ID NO: 17546 - DNA, 18 bp, synthetic construct
  misc_feature 1..18: note = Artificial sequence related to HLA knockouts in cell therapy
  source 1..18: mol_type = other DNA
gggaggcggcccatgtgg

SEQ ID NO: 17547 - DNA, 18 bp, synthetic construct
  misc_feature 1..18: note = Artificial sequence related to HLA knockouts in cell therapy
  source 1..18: mol_type = other DNA
ggaggcggcccatgtggc

SEQ ID NO: 17548 - DNA, 18 bp, synthetic construct
  misc_feature 1..18: note = Artificial sequence related to HLA knockouts in cell therapy
  source 1..18: mol_type = other DNA
gaggcggcccatgtggcg

SEQ ID NO: 17549 - DNA, 18 bp, synthetic construct
  misc_feature 1..18: note = Artificial sequence related to HLA knockouts in cell therapy
  source 1..18: mol_type = other DNA
aggcggcccatgtggcgg

SEQ ID NO: 17550 - DNA, 18 bp, synthetic construct
  misc_feature 1..18: note = Artificial sequence related to HLA knockouts in cell therapy
  source 1..18: mol_type = other DNA
ggcggcccatgtggcgga

SEQ ID NO: 17551 - DNA, 18 bp, synthetic construct
  misc_feature 1..18: note = Artificial sequence related to HLA knockouts in cell therapy
  source 1..18: mol_type = other DNA
gcggcccatgtggcggag

SEQ ID NO: 17552 - DNA, 18 bp, synthetic construct
  misc_feature 1..18: note = Artificial sequence related to HLA knockouts in cell therapy
  source 1..18: mol_type = other DNA
cggcccatgtggcggagc

SEQ ID NO: 17553 - DNA, 18 bp, synthetic construct
  misc_feature 1..18: note = Artificial sequence related to HLA knockouts in cell therapy
  source 1..18: mol_type = other DNA
ggcccatgtggcggagca

SEQ ID NO: 17554 - DNA, 18 bp, synthetic construct
  misc_feature 1..18: note = Artificial sequence related to HLA knockouts in cell therapy
  source 1..18: mol_type = other DNA
gcccatgtggcggagcag

SEQ ID NO: 17555 - DNA, 18 bp, synthetic construct
  misc_feature 1..18: note = Artificial sequence related to HLA knockouts in cell therapy
  source 1..18: mol_type = other DNA
cccatgtggcggagcagt

SEQ ID NO: 17556 - DNA, 18 bp, synthetic construct
  misc_feature 1..18: note = Artificial sequence related to HLA knockouts in cell therapy
  source 1..18: mol_type = other DNA
ccatgtggcggagcagtt

SEQ ID NO: 17557 - DNA, 18 bp, synthetic construct
  misc_feature 1..18: note = Artificial sequence related to HLA knockouts in cell therapy
  source 1..18: mol_type = other DNA
catgtggcggagcagttg

SEQ ID NO: 17558 - DNA, 18 bp, synthetic construct
  misc_feature 1..18: note = Artificial sequence related to HLA knockouts in cell therapy
  source 1..18: mol_type = other DNA
tgtggcggagcagttgag

SEQ ID NO: 17559 - DNA, 18 bp, synthetic construct
  misc_feature 1..18: note = Artificial sequence related to HLA knockouts in cell therapy
  source 1..18: mol_type = other DNA
gtggcggagcagttgaga

SEQ ID NO: 17560 - DNA, 18 bp, synthetic construct
  misc_feature 1..18: note = Artificial sequence related to HLA knockouts in cell therapy
  source 1..18: mol_type = other DNA
tggcggagcagttgagag

SEQ ID NO: 17561 - DNA, 18 bp, synthetic construct
  misc_feature 1..18: note = Artificial sequence related to HLA knockouts in cell therapy
  source 1..18: mol_type = other DNA
ggcggagcagttgagagc

SEQ ID NO: 17562 - DNA, 18 bp, synthetic construct
  misc_feature 1..18: note = Artificial sequence related to HLA knockouts in cell therapy
  source 1..18: mol_type = other DNA
gcggagcagttgagagcc

SEQ ID NO: 17563 - DNA, 18 bp, synthetic construct
  misc_feature 1..18: note = Artificial sequence related to HLA knockouts in cell therapy
  source 1..18: mol_type = other DNA
cggagcagttgagagcct

SEQ ID NO: 17564 - DNA, 18 bp, synthetic construct
  misc_feature 1..18: note = Artificial sequence related to HLA knockouts in cell therapy
  source 1..18: mol_type = other DNA
tgagagcctacctggagg

SEQ ID NO: 17565 - DNA, 18 bp, synthetic construct
  misc_feature 1..18: note = Artificial sequence related to HLA knockouts in cell therapy
  source 1..18: mol_type = other DNA
gagagcctacctggaggg

SEQ ID NO: 17566 - DNA, 18 bp, synthetic construct
  misc_feature 1..18: note = Artificial sequence related to HLA knockouts in cell therapy
  source 1..18: mol_type = other DNA
agagcctacctggagggc

SEQ ID NO: 17567 - DNA, 18 bp, synthetic construct
  misc_feature 1..18: note = Artificial sequence related to HLA knockouts in cell therapy
  source 1..18: mol_type = other DNA
gagcctacctggagggca

SEQ ID NO: 17568 - DNA, 18 bp, synthetic construct
  misc_feature 1..18: note = Artificial sequence related to HLA knockouts in cell therapy
  source 1..18: mol_type = other DNA
agcctacctggagggcac

SEQ ID NO: 17569 - DNA, 18 bp, synthetic construct
  misc_feature 1..18: note = Artificial sequence related to HLA knockouts in cell therapy
  source 1..18: mol_type = other DNA
gcctacctggagggcacg

SEQ ID NO: 17570 - DNA, 18 bp, synthetic construct
  misc_feature 1..18: note = Artificial sequence related to HLA knockouts in cell therapy
  source 1..18: mol_type = other DNA
cctacctggagggcacgt

SEQ ID NO: 17571 - DNA, 18 bp, synthetic construct
  misc_feature 1..18: note = Artificial sequence related to HLA knockouts in cell therapy
  source 1..18: mol_type = other DNA
ctacctggagggcacgtg

SEQ ID NO: 17572 - DNA, 18 bp, synthetic construct
  misc_feature 1..18: note = Artificial sequence related to HLA knockouts in cell therapy
  source 1..18: mol_type = other DNA
tacctggagggcacgtgc

SEQ ID NO: 17573 - DNA, 18 bp, synthetic construct
  misc_feature 1..18: note = Artificial sequence related to HLA knockouts in cell therapy
  source 1..18: mol_type = other DNA
acctggagggcacgtgcg

SEQ ID NO: 17574 - DNA, 18 bp, synthetic construct
  misc_feature 1..18: note = Artificial sequence related to HLA knockouts in cell therapy
  source 1..18: mol_type = other DNA
cctggagggcacgtgcgt

SEQ ID NO: 17575 - DNA, 18 bp, synthetic construct
  misc_feature 1..18: note = Artificial sequence related to HLA knockouts in cell therapy
  source 1..18: mol_type = other DNA
ctggagggcacgtgcgtg

SEQ ID NO: 17576 - DNA, 18 bp, synthetic construct
  misc_feature 1..18: note = Artificial sequence related to HLA knockouts in cell therapy
  source 1..18: mol_type = other DNA
tggagggcacgtgcgtgg

SEQ ID NO: 17577 - DNA, 18 bp, synthetic construct
  misc_feature 1..18: note = Artificial sequence related to HLA knockouts in cell therapy
  source 1..18: mol_type = other DNA
ggagggcacgtgcgtgga

SEQ ID NO: 17578 - DNA, 18 bp, synthetic construct
  misc_feature 1..18: note = Artificial sequence related to HLA knockouts in cell therapy
  source 1..18: mol_type = other DNA
gagggcacgtgcgtggag

SEQ ID NO: 17579 - DNA, 18 bp, synthetic construct
  misc_feature 1..18: note = Artificial sequence related to HLA knockouts in cell therapy
  source 1..18: mol_type = other DNA
agggcacgtgcgtggagt

SEQ ID NO: 17580 - DNA, 18 bp, synthetic construct
  misc_feature 1..18: note = Artificial sequence related to HLA knockouts in cell therapy
  source 1..18: mol_type = other DNA
gggcacgtgcgtggagtg

SEQ ID NO: 17581 - DNA, 18 bp, synthetic construct
  misc_feature 1..18: note = Artificial sequence related to HLA knockouts in cell therapy
  source 1..18: mol_type = other DNA
ggcacgtgcgtggagtgg

SEQ ID NO: 17582 - DNA, 18 bp, synthetic construct
  misc_feature 1..18: note = Artificial sequence related to HLA knockouts in cell therapy
  source 1..18: mol_type = other DNA
gcacgtgcgtggagtggc

SEQ ID NO: 17583 - DNA, 18 bp, synthetic construct
  misc_feature 1..18: note = Artificial sequence related to HLA knockouts in cell therapy
  source 1..18: mol_type = other DNA
cacgtgcgtggagtggct

SEQ ID NO: 17584 - DNA, 18 bp, synthetic construct
  misc_feature 1..18: note = Artificial sequence related to HLA knockouts in cell therapy
  source 1..18: mol_type = other DNA
acgtgcgtggagtggctc

SEQ ID NO: 17585 - DNA, 18 bp, synthetic construct
  misc_feature 1..18: note = Artificial sequence related to HLA knockouts in cell therapy
  source 1..18: mol_type = other DNA
cgtgcgtggagtggctcc

SEQ ID NO: 17586 - DNA, 18 bp, synthetic construct
  misc_feature 1..18: note = Artificial sequence related to HLA knockouts in cell therapy
  source 1..18: mol_type = other DNA
gtgcgtggagtggctccg

SEQ ID NO: 17587 - DNA, 18 bp, synthetic construct
  misc_feature 1..18: note = Artificial sequence related to HLA knockouts in cell therapy
  source 1..18: mol_type = other DNA
tgcgtggagtggctccgc

SEQ ID NO: 17588 - DNA, 18 bp, synthetic construct
  misc_feature 1..18: note = Artificial sequence related to HLA knockouts in cell therapy
  source 1..18: mol_type = other DNA
gcgtggagtggctccgca

SEQ ID NO: 17589 - DNA, 18 bp, synthetic construct
  misc_feature 1..18: note = Artificial sequence related to HLA knockouts in cell therapy
  source 1..18: mol_type = other DNA
cgtggagtggctccgcag

SEQ ID NO: 17590 - DNA, 18 bp, synthetic construct
  misc_feature 1..18: note = Artificial sequence related to HLA knockouts in cell therapy
  source 1..18: mol_type = other DNA
gtggagtggctccgcaga

SEQ ID NO: 17591 - DNA, 18 bp, synthetic construct
  misc_feature 1..18: note = Artificial sequence related to HLA knockouts in cell therapy
  source 1..18: mol_type = other DNA
tggagtggctccgcagat

SEQ ID NO: 17592 - DNA, 18 bp, synthetic construct
  misc_feature 1..18: note = Artificial sequence related to HLA knockouts in cell therapy
  source 1..18: mol_type = other DNA
ggagtggctccgcagata

SEQ ID NO: 17593 - DNA, 18 bp, synthetic construct
  misc_feature 1..18: note = Artificial sequence related to HLA knockouts in cell therapy
  source 1..18: mol_type = other DNA
gagtggctccgcagatac

SEQ ID NO: 17594 - DNA, 18 bp, synthetic construct
  misc_feature 1..18: note = Artificial sequence related to HLA knockouts in cell therapy
  source 1..18: mol_type = other DNA
agtggctccgcagatacc

SEQ ID NO: 17595 - DNA, 18 bp, synthetic construct
  misc_feature 1..18: note = Artificial sequence related to HLA knockouts in cell therapy
  source 1..18: mol_type = other DNA
gtggctccgcagatacct

SEQ ID NO: 17596 - DNA, 18 bp, synthetic construct
  misc_feature 1..18: note = Artificial sequence related to HLA knockouts in cell therapy
  source 1..18: mol_type = other DNA
tggctccgcagatacctg

SEQ ID NO: 17597 - DNA, 18 bp, synthetic construct
  misc_feature 1..18: note = Artificial sequence related to HLA knockouts in cell therapy
  source 1..18: mol_type = other DNA
ggctccgcagatacctgg

SEQ ID NO: 17598 - DNA, 18 bp, synthetic construct
  misc_feature 1..18: note = Artificial sequence related to HLA knockouts in cell therapy
  source 1..18: mol_type = other DNA
gctccgcagatacctgga

SEQ ID NO: 17599 - DNA, 18 bp, synthetic construct
  misc_feature 1..18: note = Artificial sequence related to HLA knockouts in cell therapy
  source 1..18: mol_type = other DNA
ctccgcagatacctggag

SEQ ID NO: 17600 - DNA, 18 bp, synthetic construct
  misc_feature 1..18: note = Artificial sequence related to HLA knockouts in cell therapy
  source 1..18: mol_type = other DNA
acctggagaacgggaagg

SEQ ID NO: 17601 - DNA, 18 bp, synthetic construct
  misc_feature 1..18: note = Artificial sequence related to HLA knockouts in cell therapy
  source 1..18: mol_type = other DNA
cctggagaacgggaagga

SEQ ID NO: 17602 - DNA, 18 bp, synthetic construct
  misc_feature 1..18: note = Artificial sequence related to HLA knockouts in cell therapy
  source 1..18: mol_type = other DNA
ctggagaacgggaaggag

SEQ ID NO: 17603 - DNA, 18 bp, synthetic construct
  misc_feature 1..18: note = Artificial sequence related to HLA knockouts in cell therapy
  source 1..18: mol_type = other DNA
ggagaacgggaaggagac

SEQ ID NO: 17604 - DNA, 18 bp, synthetic construct
  misc_feature 1..18: note = Artificial sequence related to HLA knockouts in cell therapy
  source 1..18: mol_type = other DNA
gagaacgggaaggagacg

SEQ ID NO: 17605 - DNA, 18 bp, synthetic construct
  misc_feature 1..18: note = Artificial sequence related to HLA knockouts in cell therapy
  source 1..18: mol_type = other DNA
agaacgggaaggagacgc

SEQ ID NO: 17606 - DNA, 18 bp, synthetic construct
  misc_feature 1..18: note = Artificial sequence related to HLA knockouts in cell therapy
  source 1..18: mol_type = other DNA
gaacgggaaggagacgct

SEQ ID NO: 17607 - DNA, 18 bp, synthetic construct
  misc_feature 1..18: note = Artificial sequence related to HLA knockouts in cell therapy
  source 1..18: mol_type = other DNA
aacgggaaggagacgctg

SEQ ID NO: 17608 - DNA, 18 bp, synthetic construct
  misc_feature 1..18: note = Artificial sequence related to HLA knockouts in cell therapy
  source 1..18: mol_type = other DNA
acgggaaggagacgctgc

SEQ ID NO: 17609 - DNA, 18 bp, synthetic construct
  misc_feature 1..18: note = Artificial sequence related to HLA knockouts in cell therapy
  source 1..18: mol_type = other DNA
cgggaaggagacgctgca

SEQ ID NO: 17610 - DNA, 18 bp, synthetic construct
  misc_feature 1..18: note = Artificial sequence related to HLA knockouts in cell therapy
  source 1..18: mol_type = other DNA
gggaaggagacgctgcag

SEQ ID NO: 17611 - DNA, 18 bp, synthetic construct
  misc_feature 1..18: note = Artificial sequence related to HLA knockouts in cell therapy
  source 1..18: mol_type = other DNA
ggaaggagacgctgcagc

SEQ ID NO: 17612 - DNA, 18 bp, synthetic construct
  misc_feature 1..18: note = Artificial sequence related to HLA knockouts in cell therapy
  source 1..18: mol_type = other DNA
gaaggagacgctgcagcg

SEQ ID NO: 17613 - DNA, 18 bp, synthetic construct
  misc_feature 1..18: note = Artificial sequence related to HLA knockouts in cell therapy
  source 1..18: mol_type = other DNA
aaggagacgctgcagcgc

SEQ ID NO: 17614 - DNA, 18 bp, synthetic construct
  misc_feature 1..18: note = Artificial sequence related to HLA knockouts in cell therapy
  source 1..18: mol_type = other DNA
aggagacgctgcagcgca

SEQ ID NO: 17615 - DNA, 18 bp, synthetic construct
  misc_feature 1..18: note = Artificial sequence related to HLA knockouts in cell therapy
  source 1..18: mol_type = other DNA
ggagacgctgcagcgcac

SEQ ID NO: 17616 - DNA, 18 bp, synthetic construct
  misc_feature 1..18: note = Artificial sequence related to HLA knockouts in cell therapy
  source 1..18: mol_type = other DNA
gagacgctgcagcgcacg

SEQ ID NO: 17617 - DNA, 18 bp, synthetic construct
  misc_feature 1..18: note = Artificial sequence related to HLA knockouts in cell therapy
  source 1..18: mol_type = other DNA
agacgctgcagcgcacgg

SEQ ID NO: 17618 - DNA, 18 bp, synthetic construct
  misc_feature 1..18: note = Artificial sequence related to HLA knockouts in cell therapy
  source 1..18: mol_type = other DNA
gacgctgcagcgcacgga

SEQ ID NO: 17619 - DNA, 18 bp, synthetic construct
  misc_feature 1..18: note = Artificial sequence related to HLA knockouts in cell therapy
  source 1..18: mol_type = other DNA
acgctgcagcgcacggac

SEQ ID NO: 17620 - DNA, 18 bp, synthetic construct
  misc_feature 1..18: note = Artificial sequence related to HLA knockouts in cell therapy
  source 1..18: mol_type = other DNA
cgctgcagcgcacggacg

SEQ ID NO: 17621 - DNA, 18 bp, synthetic construct
  misc_feature 1..18: note = Artificial sequence related to HLA knockouts in cell therapy
  source 1..18: mol_type = other DNA
gctgcagcgcacggacgc

SEQ ID NO: 17622 - DNA, 18 bp, synthetic construct
  misc_feature 1..18: note = Artificial sequence related to HLA knockouts in cell therapy
  source 1..18: mol_type = other DNA
ctgcagcgcacggacgcc

SEQ ID NO: 17623 - DNA, 18 bp, synthetic construct
  misc_feature 1..18: note = Artificial sequence related to HLA knockouts in cell therapy
  source 1..18: mol_type = other DNA
tgcagcgcacggacgccc

SEQ ID NO: 17624 - DNA, 18 bp, synthetic construct
  misc_feature 1..18: note = Artificial sequence related to HLA knockouts in cell therapy
  source 1..18: mol_type = other DNA
gcagcgcacggacgcccc

SEQ ID NO: 17625 - DNA, 18 bp, synthetic construct
  misc_feature 1..18: note = Artificial sequence related to HLA knockouts in cell therapy
  source 1..18: mol_type = other DNA
cagcgcacggacgccccc

SEQ ID NO: 17626 - DNA, 18 bp, synthetic construct
  misc_feature 1..18: note = Artificial sequence related to HLA knockouts in cell therapy
  source 1..18: mol_type = other DNA
agcgcacggacgccccca

SEQ ID NO: 17627 - DNA, 18 bp, synthetic construct
  misc_feature 1..18: note = Artificial sequence related to HLA knockouts in cell therapy
  source 1..18: mol_type = other DNA
gcgcacggacgcccccaa

SEQ ID NO: 17628 - DNA, 18 bp, synthetic construct
  misc_feature 1..18: note = Artificial sequence related to HLA knockouts in cell therapy
  source 1..18: mol_type = other DNA
cgcacggacgcccccaaa

SEQ ID NO: 17629 - DNA, 18 bp, synthetic construct
  misc_feature 1..18: note = Artificial sequence related to HLA knockouts in cell therapy
  source 1..18: mol_type = other DNA
gcacggacgcccccaaaa

SEQ ID NO: 17630 - DNA, 18 bp, synthetic construct
  misc_feature 1..18: note = Artificial sequence related to HLA knockouts in cell therapy
  source 1..18: mol_type = other DNA
cacggacgcccccaaaac

SEQ ID NO: 17631 - DNA, 18 bp, synthetic construct
  misc_feature 1..18: note = Artificial sequence related to HLA knockouts in cell therapy
  source 1..18: mol_type = other DNA
acggacgcccccaaaacg

SEQ ID NO: 17632 - DNA, 18 bp, synthetic construct
  misc_feature 1..18: note = Artificial sequence related to HLA knockouts in cell therapy
  source 1..18: mol_type = other DNA
cggacgcccccaaaacgc

SEQ ID NO: 17633 - DNA, 18 bp, synthetic construct
  misc_feature 1..18: note = Artificial sequence related to HLA knockouts in cell therapy
  source 1..18: mol_type = other DNA
ggacgcccccaaaacgca

SEQ ID NO: 17634 - DNA, 18 bp, synthetic construct
  misc_feature 1..18: note = Artificial sequence related to HLA knockouts in cell therapy
  source 1..18: mol_type = other DNA
gacgcccccaaaacgcat

SEQ ID NO: 17635 - DNA, 18 bp, synthetic construct
  misc_feature 1..18: note = Artificial sequence related to HLA knockouts in cell therapy
  source 1..18: mol_type = other DNA
gactcaccacgctgtctc

SEQ ID NO: 17636 - DNA, 18 bp, synthetic construct
  misc_feature 1..18: note = Artificial sequence related to HLA knockouts in cell therapy
  source 1..18: mol_type = other DNA
ctcaccacgctgtctctg

SEQ ID NO: 17637 - DNA, 18 bp, synthetic construct
  misc_feature 1..18: note = Artificial sequence related to HLA knockouts in cell therapy
  source 1..18: mol_type = other DNA
caccacgctgtctctgac

SEQ ID NO: 17638 - DNA, 18 bp, synthetic construct
  misc_feature 1..18: note = Artificial sequence related to HLA knockouts in cell therapy
  source 1..18: mol_type = other DNA
accacgctgtctctgacc

SEQ ID NO: 17639 - DNA, 18 bp, synthetic construct
  misc_feature 1..18: note = Artificial sequence related to HLA knockouts in cell therapy
  source 1..18: mol_type = other DNA
ccacgctgtctctgacca

SEQ ID NO: 17640 - DNA, 18 bp, synthetic construct
  misc_feature 1..18: note = Artificial sequence related to HLA knockouts in cell therapy
  source 1..18: mol_type = other DNA
ctgaccatgaagccaccc

SEQ ID NO: 17641 - DNA, 18 bp, synthetic construct
  misc_feature 1..18: note = Artificial sequence related to HLA knockouts in cell therapy
  source 1..18: mol_type = other DNA
gaccatgaagccaccctg

SEQ ID NO: 17642 - DNA, 18 bp, synthetic construct
  misc_feature 1..18: note = Artificial sequence related to HLA knockouts in cell therapy
  source 1..18: mol_type = other DNA
ccatgaagccaccctgag

SEQ ID NO: 17643 - DNA, 18 bp, synthetic construct
  misc_feature 1..18: note = Artificial sequence related to HLA knockouts in cell therapy
  source 1..18: mol_type = other DNA
catgaagccaccctgagg

SEQ ID NO: 17644 - DNA, 18 bp, synthetic construct
  misc_feature 1..18: note = Artificial sequence related to HLA knockouts in cell therapy
  source 1..18: mol_type = other DNA
tgaagccaccctgaggtg

SEQ ID NO: 17645 - DNA, 18 bp, synthetic construct
  misc_feature 1..18: note = Artificial sequence related to HLA knockouts in cell therapy
  source 1..18: mol_type = other DNA
gaagccaccctgaggtgc

SEQ ID NO: 17646 - DNA, 18 bp, synthetic construct
  misc_feature 1..18: note = Artificial sequence related to HLA knockouts in cell therapy
  source 1..18: mol_type = other DNA
aagccaccctgaggtgct

SEQ ID NO: 17647 - DNA, 18 bp, synthetic construct
  misc_feature 1..18: note = Artificial sequence related to HLA knockouts in cell therapy
  source 1..18: mol_type = other DNA
agccaccctgaggtgctg

SEQ ID NO: 17648 - DNA, 18 bp, synthetic construct
  misc_feature 1..18: note = Artificial sequence related to HLA knockouts in cell therapy
  source 1..18: mol_type = other DNA
gccaccctgaggtgctgg

SEQ ID NO: 17649 - DNA, 18 bp, synthetic construct
  misc_feature 1..18: note = Artificial sequence related to HLA knockouts in cell therapy
  source 1..18: mol_type = other DNA
ccaccctgaggtgctggg

SEQ ID NO: 17650 - DNA, 18 bp, synthetic construct
  misc_feature 1..18: note = Artificial sequence related to HLA knockouts in cell therapy
  source 1..18: mol_type = other DNA
caccctgaggtgctgggc

SEQ ID NO: 17651 - DNA, 18 bp, synthetic construct
  misc_feature 1..18: note = Artificial sequence related to HLA knockouts in cell therapy
  source 1..18: mol_type = other DNA
accctgaggtgctgggcc

SEQ ID NO: 17652 - DNA, 18 bp, synthetic construct
  misc_feature 1..18: note = Artificial sequence related to HLA knockouts in cell therapy
  source 1..18: mol_type = other DNA
ccctgaggtgctgggccc

SEQ ID NO: 17653 - DNA, 18 bp, synthetic construct
  misc_feature 1..18: note = Artificial sequence related to HLA knockouts in cell therapy
  source 1..18: mol_type = other DNA
cctgaggtgctgggccct

SEQ ID NO: 17654 - DNA, 18 bp, synthetic construct
  misc_feature 1..18: note = Artificial sequence related to HLA knockouts in cell therapy
  source 1..18: mol_type = other DNA
ctgaggtgctgggccctg

SEQ ID NO: 17655 - DNA, 18 bp, synthetic construct
  misc_feature 1..18: note = Artificial sequence related to HLA knockouts in cell therapy
  source 1..18: mol_type = other DNA
tgaggtgctgggccctga

SEQ ID NO: 17656 - DNA, 18 bp, synthetic construct
  misc_feature 1..18: note = Artificial sequence related to HLA knockouts in cell therapy
  source 1..18: mol_type = other DNA
gaggtgctgggccctgag

SEQ ID NO: 17657 - DNA, 18 bp, synthetic construct
  misc_feature 1..18: note = Artificial sequence related to HLA knockouts in cell therapy
  source 1..18: mol_type = other DNA
aggtgctgggccctgagc

SEQ ID NO: 17658 - DNA, 18 bp, synthetic construct
  misc_feature 1..18: note = Artificial sequence related to HLA knockouts in cell therapy
  source 1..18: mol_type = other DNA
ggtgctgggccctgagct

SEQ ID NO: 17659 - DNA, 18 bp, synthetic construct
  misc_feature 1..18: note = Artificial sequence related to HLA knockouts in cell therapy
  source 1..18: mol_type = other DNA
gtgctgggccctgagctt

SEQ ID NO: 17660 - DNA, 18 bp, synthetic construct
  misc_feature 1..18: note = Artificial sequence related to HLA knockouts in cell therapy
  source 1..18: mol_type = other DNA
tgctgggccctgagcttc

SEQ ID NO: 17661 - DNA, 18 bp, synthetic construct
  misc_feature 1..18: note = Artificial sequence related to HLA knockouts in cell therapy
  source 1..18: mol_type = other DNA
gctgggccctgagcttct

SEQ ID NO: 17662 - DNA, 18 bp, synthetic construct
  misc_feature 1..18: note = Artificial sequence related to HLA knockouts in cell therapy
  source 1..18: mol_type = other DNA
ctgggccctgagcttcta

SEQ ID NO: 17663 - DNA, 18 bp, synthetic construct
  misc_feature 1..18: note = Artificial sequence related to HLA knockouts in cell therapy
  source 1..18: mol_type = other DNA
tgggccctgagcttctac

SEQ ID NO: 17664 - DNA, 18 bp, synthetic construct
  misc_feature 1..18: note = Artificial sequence related to HLA knockouts in cell therapy
  source 1..18: mol_type = other DNA
gggccctgagcttctacc

SEQ ID NO: 17665 - DNA, 18 bp, synthetic construct
  misc_feature 1..18: note = Artificial sequence related to HLA knockouts in cell therapy
  source 1..18: mol_type = other DNA
ggccctgagcttctaccc

SEQ ID NO: 17666 - DNA, 18 bp, synthetic construct
  misc_feature 1..18: note = Artificial sequence related to HLA knockouts in cell therapy
  source 1..18: mol_type = other DNA
gccctgagcttctaccct

SEQ ID NO: 17667 - DNA, 18 bp, synthetic construct
  misc_feature 1..18: note = Artificial sequence related to HLA knockouts in cell therapy
  source 1..18: mol_type = other DNA
ccctgagcttctaccctg

SEQ ID NO: 17668 - DNA, 18 bp, synthetic construct
  misc_feature 1..18: note = Artificial sequence related to HLA knockouts in cell therapy
  source 1..18: mol_type = other DNA
cctgagcttctaccctgc

SEQ ID NO: 17669 - DNA, 18 bp, synthetic construct
  misc_feature 1..18: note = Artificial sequence related to HLA knockouts in cell therapy
  source 1..18: mol_type = other DNA
ctgagcttctaccctgcg

SEQ ID NO: 17670 - DNA, 18 bp, synthetic construct
  misc_feature 1..18: note = Artificial sequence related to HLA knockouts in cell therapy
  source 1..18: mol_type = other DNA
tgagcttctaccctgcgg

SEQ ID NO: 17671 - DNA, 18 bp, synthetic construct
  misc_feature 1..18: note = Artificial sequence related to HLA knockouts in cell therapy
  source 1..18: mol_type = other DNA
gagcttctaccctgcgga

SEQ ID NO: 17672 - DNA, 18 bp, synthetic construct
  misc_feature 1..18: note = Artificial sequence related to HLA knockouts in cell therapy
  source 1..18: mol_type = other DNA
agcttctaccctgcggag

SEQ ID NO: 17673 - DNA, 18 bp, synthetic construct
  misc_feature 1..18: note = Artificial sequence related to HLA knockouts in cell therapy
  source 1..18: mol_type = other DNA
gcttctaccctgcggaga

SEQ ID NO: 17674 - DNA, 18 bp, synthetic construct
  misc_feature 1..18: note = Artificial sequence related to HLA knockouts in cell therapy
  source 1..18: mol_type = other DNA
ctaccctgcggagatcac

SEQ ID NO: 17675 - DNA, 18 bp, synthetic construct
  misc_feature 1..18: note = Artificial sequence related to HLA knockouts in cell therapy
  source 1..18: mol_type = other DNA
accctgcggagatcacac

SEQ ID NO: 17676 - DNA, 18 bp, synthetic construct
  misc_feature 1..18: note = Artificial sequence related to HLA knockouts in cell therapy
  source 1..18: mol_type = other DNA
ccctgcggagatcacact

SEQ ID NO: 17677 - DNA, 18 bp, synthetic construct
  misc_feature 1..18: note = Artificial sequence related to HLA knockouts in cell therapy
  source 1..18: mol_type = other DNA
cctgcggagatcacactg

SEQ ID NO: 17678 - DNA, 18 bp, synthetic construct
  misc_feature 1..18: note = Artificial sequence related to HLA knockouts in cell therapy
  source 1..18: mol_type = other DNA
gcggagatcacactgacc

SEQ ID NO: 17679 - DNA, 18 bp, synthetic construct
  misc_feature 1..18: note = Artificial sequence related to HLA knockouts in cell therapy
  source 1..18: mol_type = other DNA
tcacactgacctggcagc

SEQ ID NO: 17680 - DNA, 18 bp, synthetic construct
  misc_feature 1..18: note = Artificial sequence related to HLA knockouts in cell therapy
  source 1..18: mol_type = other DNA
cacactgacctggcagcg

SEQ ID NO: 17681 - DNA, 18 bp, synthetic construct
  misc_feature 1..18: note = Artificial sequence related to HLA knockouts in cell therapy
  source 1..18: mol_type = other DNA
acactgacctggcagcgg

SEQ ID NO: 17682 - DNA, 18 bp, synthetic construct
  misc_feature 1..18: note = Artificial sequence related to HLA knockouts in cell therapy
  source 1..18: mol_type = other DNA
cactgacctggcagcggg

SEQ ID NO: 17683 - DNA, 18 bp, synthetic construct
  misc_feature 1..18: note = Artificial sequence related to HLA knockouts in cell therapy
  source 1..18: mol_type = other DNA
actgacctggcagcggga

SEQ ID NO: 17684 - DNA, 18 bp, synthetic construct
  misc_feature 1..18: note = Artificial sequence related to HLA knockouts in cell therapy
  source 1..18: mol_type = other DNA
ctgacctggcagcgggat

SEQ ID NO: 17685 - DNA, 18 bp, synthetic construct
  misc_feature 1..18: note = Artificial sequence related to HLA knockouts in cell therapy
  source 1..18: mol_type = other DNA
tgacctggcagcgggatg

SEQ ID NO: 17686 - DNA, 18 bp, synthetic construct
  misc_feature 1..18: note = Artificial sequence related to HLA knockouts in cell therapy
  source 1..18: mol_type = other DNA
gacctggcagcgggatgg

SEQ ID NO: 17687 - DNA, 18 bp, synthetic construct
  misc_feature 1..18: note = Artificial sequence related to HLA knockouts in cell therapy
  source 1..18: mol_type = other DNA
acctggcagcgggatggg

SEQ ID NO: 17688 - DNA, 18 bp, synthetic construct
  misc_feature 1..18: note = Artificial sequence related to HLA knockouts in cell therapy
  source 1..18: mol_type = other DNA
cctggcagcgggatgggg

SEQ ID NO: 17689 - DNA, 18 bp, synthetic construct
  misc_feature 1..18: note = Artificial sequence related to HLA knockouts in cell therapy
  source 1..18: mol_type = other DNA
ctggcagcgggatgggga

SEQ ID NO: 17690 - DNA, 18 bp, synthetic construct
  misc_feature 1..18: note = Artificial sequence related to HLA knockouts in cell therapy
  source 1..18: mol_type = other DNA
tggcagcgggatggggag

SEQ ID NO: 17691 - DNA, 18 bp, synthetic construct
  misc_feature 1..18: note = Artificial sequence related to HLA knockouts in cell therapy
  source 1..18: mol_type = other DNA
ggcagcgggatggggagg

SEQ ID NO: 17692 - DNA, 18 bp, synthetic construct
  misc_feature 1..18: note = Artificial sequence related to HLA knockouts in cell therapy
  source 1..18: mol_type = other DNA
gcagcgggatggggagga

SEQ ID NO: 17693 - DNA, 18 bp, synthetic construct
  misc_feature 1..18: note = Artificial sequence related to HLA knockouts in cell therapy
  source 1..18: mol_type = other DNA
cagcgggatggggaggac

SEQ ID NO: 17694 - DNA, 18 bp, synthetic construct
  misc_feature 1..18: note = Artificial sequence related to HLA knockouts in cell therapy
  source 1..18: mol_type = other DNA
agcgggatggggaggacc

SEQ ID NO: 17695 - DNA, 18 bp, synthetic construct
  misc_feature 1..18: note = Artificial sequence related to HLA knockouts in cell therapy
  source 1..18: mol_type = other DNA
gcgggatggggaggacca

SEQ ID NO: 17696 - DNA, 18 bp, synthetic construct
  misc_feature 1..18: note = Artificial sequence related to HLA knockouts in cell therapy
  source 1..18: mol_type = other DNA
cgggatggggaggaccag

SEQ ID NO: 17697 - DNA, 18 bp, synthetic construct
  misc_feature 1..18: note = Artificial sequence related to HLA knockouts in cell therapy
  source 1..18: mol_type = other DNA
gggatggggaggaccaga

SEQ ID NO: 17698 - DNA, 18 bp, synthetic construct
  misc_feature 1..18: note = Artificial sequence related to HLA knockouts in cell therapy
  source 1..18: mol_type = other DNA
ggatggggaggaccagac

SEQ ID NO: 17699 - DNA, 18 bp, synthetic construct
  misc_feature 1..18: note = Artificial sequence related to HLA knockouts in cell therapy
  source 1..18: mol_type = other DNA
gatggggaggaccagacc

SEQ ID NO: 17700 - DNA, 18 bp, synthetic construct
  misc_feature 1..18: note = Artificial sequence related to HLA knockouts in cell therapy
  source 1..18: mol_type = other DNA
atggggaggaccagaccc

SEQ ID NO: 17701 - DNA, 18 bp, synthetic construct
  misc_feature 1..18: note = Artificial sequence related to HLA knockouts in cell therapy
  source 1..18: mol_type = other DNA
tggggaggaccagaccca

SEQ ID NO: 17702 - DNA, 18 bp, synthetic construct
  misc_feature 1..18: note = Artificial sequence related to HLA knockouts in cell therapy
  source 1..18: mol_type = other DNA
ggggaggaccagacccag

SEQ ID NO: 17703 - DNA, 18 bp, synthetic construct
  misc_feature 1..18: note = Artificial sequence related to HLA knockouts in cell therapy
  source 1..18: mol_type = other DNA
gggaggaccagacccagg

SEQ ID NO: 17704 - DNA, 18 bp, synthetic construct
  misc_feature 1..18: note = Artificial sequence related to HLA knockouts in cell therapy
  source 1..18: mol_type = other DNA
ggaggaccagacccagga

SEQ ID NO: 17705 - DNA, 18 bp, synthetic construct
  misc_feature 1..18: note = Artificial sequence related to HLA knockouts in cell therapy
  source 1..18: mol_type = other DNA
gaggaccagacccaggac

SEQ ID NO: 17706 - DNA, 18 bp, synthetic construct
  misc_feature 1..18: note = Artificial sequence related to HLA knockouts in cell therapy
  source 1..18: mol_type = other DNA
aggaccagacccaggaca

SEQ ID NO: 17707 - DNA, 18 bp, synthetic construct
  misc_feature 1..18: note = Artificial sequence related to HLA knockouts in cell therapy
  source 1..18: mol_type = other DNA
ggaccagacccaggacac

SEQ ID NO: 17708 - DNA, 18 bp, synthetic construct
  misc_feature 1..18: note = Artificial sequence related to HLA knockouts in cell therapy
  source 1..18: mol_type = other DNA
gaccagacccaggacacg

SEQ ID NO: 17709 - DNA, 18 bp, synthetic construct
  misc_feature 1..18: note = Artificial sequence related to HLA knockouts in cell therapy
  source 1..18: mol_type = other DNA
accagacccaggacacgg

SEQ ID NO: 17710 - DNA, 18 bp, synthetic construct
  misc_feature 1..18: note = Artificial sequence related to HLA knockouts in cell therapy
  source 1..18: mol_type = other DNA
ccagacccaggacacgga

SEQ ID NO: 17711 - DNA, 18 bp, synthetic construct
  misc_feature 1..18: note = Artificial sequence related to HLA knockouts in cell therapy
  source 1..18: mol_type = other DNA
cagacccaggacacggag

SEQ ID NO: 17712 - DNA, 18 bp, synthetic construct
  misc_feature 1..18: note = Artificial sequence related to HLA knockouts in cell therapy
  source 1..18: mol_type = other DNA
agacccaggacacggagc

SEQ ID NO: 17713 - DNA, 18 bp, synthetic construct
  misc_feature 1..18: note = Artificial sequence related to HLA knockouts in cell therapy
  source 1..18: mol_type = other DNA
gacccaggacacggagct

SEQ ID NO: 17714 - DNA, 18 bp, synthetic construct
  misc_feature 1..18: note = Artificial sequence related to HLA knockouts in cell therapy
  source 1..18: mol_type = other DNA
acccaggacacggagctc

SEQ ID NO: 17715 - DNA, 18 bp, synthetic construct
  misc_feature 1..18: note = Artificial sequence related to HLA knockouts in cell therapy
  source 1..18: mol_type = other DNA
cccaggacacggagctcg

SEQ ID NO: 17716 - DNA, 18 bp, synthetic construct
  misc_feature 1..18: note = Artificial sequence related to HLA knockouts in cell therapy
  source 1..18: mol_type = other DNA
ccaggacacggagctcgt

SEQ ID NO: 17717 - DNA, 18 bp, synthetic construct
  misc_feature 1..18: note = Artificial sequence related to HLA knockouts in cell therapy
  source 1..18: mol_type = other DNA
caggacacggagctcgtg

SEQ ID NO: 17718 - DNA, 18 bp, synthetic construct
  misc_feature 1..18: note = Artificial sequence related to HLA knockouts in cell therapy
  source 1..18: mol_type = other DNA
aggacacggagctcgtgg

SEQ ID NO: 17719 - DNA, 18 bp, synthetic construct
  misc_feature 1..18: note = Artificial sequence related to HLA knockouts in cell therapy
  source 1..18: mol_type = other DNA
ggacacggagctcgtgga

SEQ ID NO: 17720 - DNA, 18 bp, synthetic construct
  misc_feature 1..18: note = Artificial sequence related to HLA knockouts in cell therapy
  source 1..18: mol_type = other DNA
gacacggagctcgtggag

SEQ ID NO: 17721 - DNA, 18 bp, synthetic construct
  misc_feature 1..18: note = Artificial sequence related to HLA knockouts in cell therapy
  source 1..18: mol_type = other DNA
acacggagctcgtggaga

SEQ ID NO: 17722 - DNA, 18 bp, synthetic construct
  misc_feature 1..18: note = Artificial sequence related to HLA knockouts in cell therapy
  source 1..18: mol_type = other DNA
cacggagctcgtggagac

SEQ ID NO: 17723 - DNA, 18 bp, synthetic construct
  misc_feature 1..18: note = Artificial sequence related to HLA knockouts in cell therapy
  source 1..18: mol_type = other DNA
acggagctcgtggagacc

SEQ ID NO: 17724 - DNA, 18 bp, synthetic construct
  misc_feature 1..18: note = Artificial sequence related to HLA knockouts in cell therapy
  source 1..18: mol_type = other DNA
cggagctcgtggagacca

SEQ ID NO: 17725 - DNA, 18 bp, synthetic construct
  misc_feature 1..18: note = Artificial sequence related to HLA knockouts in cell therapy
  source 1..18: mol_type = other DNA
ggagctcgtggagaccag

SEQ ID NO: 17726 - DNA, 18 bp, synthetic construct
  misc_feature 1..18: note = Artificial sequence related to HLA knockouts in cell therapy
  source 1..18: mol_type = other DNA
gagctcgtggagaccagg

SEQ ID NO: 17727 - DNA, 18 bp, synthetic construct
  misc_feature 1..18: note = Artificial sequence related to HLA knockouts in cell therapy
  source 1..18: mol_type = other DNA
agctcgtggagaccaggc

SEQ ID NO: 17728 - DNA, 18 bp, synthetic construct
  misc_feature 1..18: note = Artificial sequence related to HLA knockouts in cell therapy
  source 1..18: mol_type = other DNA
gctcgtggagaccaggcc

SEQ ID NO: 17729 - DNA, 18 bp, synthetic construct
  misc_feature 1..18: note = Artificial sequence related to HLA knockouts in cell therapy
  source 1..18: mol_type = other DNA
ctcgtggagaccaggcct

SEQ ID NO: 17730 - DNA, 18 bp, synthetic construct
  misc_feature 1..18: note = Artificial sequence related to HLA knockouts in cell therapy
  source 1..18: mol_type = other DNA
tcgtggagaccaggcctg

SEQ ID NO: 17731 - DNA, 18 bp, synthetic construct
  misc_feature 1..18: note = Artificial sequence related to HLA knockouts in cell therapy
  source 1..18: mol_type = other DNA
cgtggagaccaggcctgc

SEQ ID NO: 17732 - DNA, 18 bp, synthetic construct
  misc_feature 1..18: note = Artificial sequence related to HLA knockouts in cell therapy
  source 1..18: mol_type = other DNA
gtggagaccaggcctgca

SEQ ID NO: 17733 - DNA, 18 bp, synthetic construct
  misc_feature 1..18: note = Artificial sequence related to HLA knockouts in cell therapy
  source 1..18: mol_type = other DNA
tggagaccaggcctgcag

SEQ ID NO: 17734 - DNA, 18 bp, synthetic construct
  misc_feature 1..18: note = Artificial sequence related to HLA knockouts in cell therapy
  source 1..18: mol_type = other DNA
ggagaccaggcctgcagg

SEQ ID NO: 17735 - DNA, 18 bp, synthetic construct
  misc_feature 1..18: note = Artificial sequence related to HLA knockouts in cell therapy
  source 1..18: mol_type = other DNA
gagaccaggcctgcaggg

SEQ ID NO: 17736 - DNA, 18 bp, synthetic construct
  misc_feature 1..18: note = Artificial sequence related to HLA knockouts in cell therapy
  source 1..18: mol_type = other DNA
agaccaggcctgcagggg

SEQ ID NO: 17737 - DNA, 18 bp, synthetic construct
  misc_feature 1..18: note = Artificial sequence related to HLA knockouts in cell therapy
  source 1..18: mol_type = other DNA
gaccaggcctgcagggga

SEQ ID NO: 17738 - DNA, 18 bp, synthetic construct
  misc_feature 1..18: note = Artificial sequence related to HLA knockouts in cell therapy
  source 1..18: mol_type = other DNA
accaggcctgcaggggat

SEQ ID NO: 17739 - DNA, 18 bp, synthetic construct
  misc_feature 1..18: note = Artificial sequence related to HLA knockouts in cell therapy
  source 1..18: mol_type = other DNA
ccaggcctgcaggggatg

SEQ ID NO: 17740 - DNA, 18 bp, synthetic construct
  misc_feature 1..18: note = Artificial sequence related to HLA knockouts in cell therapy
  source 1..18: mol_type = other DNA
caggcctgcaggggatgg

SEQ ID NO: 17741 - DNA, 18 bp, synthetic construct
  misc_feature 1..18: note = Artificial sequence related to HLA knockouts in cell therapy
  source 1..18: mol_type = other DNA
aggcctgcaggggatgga

SEQ ID NO: 17742 - DNA, 18 bp, synthetic construct
  misc_feature 1..18: note = Artificial sequence related to HLA knockouts in cell therapy
  source 1..18: mol_type = other DNA
ggcctgcaggggatggaa

SEQ ID NO: 17743 - DNA, 18 bp, synthetic construct
  misc_feature 1..18: note = Artificial sequence related to HLA knockouts in cell therapy
  source 1..18: mol_type = other DNA
gcctgcaggggatggaac

SEQ ID NO: 17744 - DNA, 18 bp, synthetic construct
  misc_feature 1..18: note = Artificial sequence related to HLA knockouts in cell therapy
  source 1..18: mol_type = other DNA
cctgcaggggatggaacc

SEQ ID NO: 17745 - DNA, 18 bp, synthetic construct
  misc_feature 1..18: note = Artificial sequence related to HLA knockouts in cell therapy
  source 1..18: mol_type = other DNA
ctgcaggggatggaacct

SEQ ID NO: 17746 - DNA, 18 bp, synthetic construct
  misc_feature 1..18: note = Artificial sequence related to HLA knockouts in cell therapy
  source 1..18: mol_type = other DNA
gcaggggatggaaccttc

SEQ ID NO: 17747 - DNA, 18 bp, synthetic construct
  misc_feature 1..18: note = Artificial sequence related to HLA knockouts in cell therapy
  source 1..18: mol_type = other DNA
caggggatggaaccttcc

SEQ ID NO: 17748 - DNA, 18 bp, synthetic construct
  misc_feature 1..18: note = Artificial sequence related to HLA knockouts in cell therapy
  source 1..18: mol_type = other DNA
ggggatggaaccttccag

SEQ ID NO: 17749 - DNA, 18 bp, synthetic construct
  misc_feature 1..18: note = Artificial sequence related to HLA knockouts in cell therapy
  source 1..18: mol_type = other DNA
accttccagaagtgggcg

SEQ ID NO: 17750 - DNA, 18 bp, synthetic construct
  misc_feature 1..18: note = Artificial sequence related to HLA knockouts in cell therapy
  source 1..18: mol_type = other DNA
ccttccagaagtgggcgg

SEQ ID NO: 17751 - DNA, 18 bp, synthetic construct
  misc_feature 1..18: note = Artificial sequence related to HLA knockouts in cell therapy
  source 1..18: mol_type = other DNA
cttccagaagtgggcggc

SEQ ID NO: 17752 - DNA, 18 bp, synthetic construct
  misc_feature 1..18: note = Artificial sequence related to HLA knockouts in cell therapy
  source 1..18: mol_type = other DNA
ttccagaagtgggcggct

SEQ ID NO: 17753 - DNA, 18 bp, synthetic construct
  misc_feature 1..18: note = Artificial sequence related to HLA knockouts in cell therapy
  source 1..18: mol_type = other DNA
tccagaagtgggcggctg

SEQ ID NO: 17754 - DNA, 18 bp, synthetic construct
  misc_feature 1..18: note = Artificial sequence related to HLA knockouts in cell therapy
  source 1..18: mol_type = other DNA
ccagaagtgggcggctgt

SEQ ID NO: 17755 - DNA, 18 bp, synthetic construct
  misc_feature 1..18: note = Artificial sequence related to HLA knockouts in cell therapy
  source 1..18: mol_type = other DNA
cagaagtgggcggctgtg

SEQ ID NO: 17756 - DNA, 18 bp, synthetic construct
  misc_feature 1..18: note = Artificial sequence related to HLA knockouts in cell therapy
  source 1..18: mol_type = other DNA
agaagtgggcggctgtgg

SEQ ID NO: 17757 - DNA, 18 bp, synthetic construct
  misc_feature 1..18: note = Artificial sequence related to HLA knockouts in cell therapy
  source 1..18: mol_type = other DNA
gaagtgggcggctgtggt

SEQ ID NO: 17758 - DNA, 18 bp, synthetic construct
  misc_feature 1..18: note = Artificial sequence related to HLA knockouts in cell therapy
  source 1..18: mol_type = other DNA
aagtgggcggctgtggtg

SEQ ID NO: 17759 - DNA, 18 bp, synthetic construct
  misc_feature 1..18: note = Artificial sequence related to HLA knockouts in cell therapy
  source 1..18: mol_type = other DNA
agtgggcggctgtggtgg

SEQ ID NO: 17760 - DNA, 18 bp, synthetic construct
  misc_feature 1..18: note = Artificial sequence related to HLA knockouts in cell therapy
  source 1..18: mol_type = other DNA
gtgggcggctgtggtggt

SEQ ID NO: 17761 - DNA, 18 bp, synthetic construct
  misc_feature 1..18: note = Artificial sequence related to HLA knockouts in cell therapy
  source 1..18: mol_type = other DNA
tgggcggctgtggtggtg

SEQ ID NO: 17762 - DNA, 18 bp, synthetic construct
  misc_feature 1..18: note = Artificial sequence related to HLA knockouts in cell therapy
  source 1..18: mol_type = other DNA
gggcggctgtggtggtgc

SEQ ID NO: 17763 - DNA, 18 bp, synthetic construct
  misc_feature 1..18: note = Artificial sequence related to HLA knockouts in cell therapy
  source 1..18: mol_type = other DNA
ggcggctgtggtggtgcc

SEQ ID NO: 17764 - DNA, 18 bp, synthetic construct
  misc_feature 1..18: note = Artificial sequence related to HLA knockouts in cell therapy
  source 1..18: mol_type = other DNA
gcggctgtggtggtgcct

SEQ ID NO: 17765 - DNA, 18 bp, synthetic construct
  misc_feature 1..18: note = Artificial sequence related to HLA knockouts in cell therapy
  source 1..18: mol_type = other DNA
cggctgtggtggtgcctt

SEQ ID NO: 17766 - DNA, 18 bp, synthetic construct
  misc_feature 1..18: note = Artificial sequence related to HLA knockouts in cell therapy
  source 1..18: mol_type = other DNA
ggctgtggtggtgccttc

SEQ ID NO: 17767 - DNA, 18 bp, synthetic construct
  misc_feature 1..18: note = Artificial sequence related to HLA knockouts in cell therapy
  source 1..18: mol_type = other DNA
gctgtggtggtgccttct

SEQ ID NO: 17768 - DNA, 18 bp, synthetic construct
  misc_feature 1..18: note = Artificial sequence related to HLA knockouts in cell therapy
  source 1..18: mol_type = other DNA
ctgtggtggtgccttctg

SEQ ID NO: 17769 - DNA, 18 bp, synthetic construct
  misc_feature 1..18: note = Artificial sequence related to HLA knockouts in cell therapy
  source 1..18: mol_type = other DNA
tgtggtggtgccttctgg

SEQ ID NO: 17770 - DNA, 18 bp, synthetic construct
  misc_feature 1..18: note = Artificial sequence related to HLA knockouts in cell therapy
  source 1..18: mol_type = other DNA
gtggtggtgccttctgga

SEQ ID NO: 17771 - DNA, 18 bp, synthetic construct
  misc_feature 1..18: note = Artificial sequence related to HLA knockouts in cell therapy
  source 1..18: mol_type = other DNA
tggtggtgccttctggac

SEQ ID NO: 17772 - DNA, 18 bp, synthetic construct
  misc_feature 1..18: note = Artificial sequence related to HLA knockouts in cell therapy
  source 1..18: mol_type = other DNA
ggtggtgccttctggaca

SEQ ID NO: 17773 - DNA, 18 bp, synthetic construct
  misc_feature 1..18: note = Artificial sequence related to HLA knockouts in cell therapy
  source 1..18: mol_type = other DNA
gtggtgccttctggacag

SEQ ID NO: 17774 - DNA, 18 bp, synthetic construct
  misc_feature 1..18: note = Artificial sequence related to HLA knockouts in cell therapy
  source 1..18: mol_type = other DNA
tggtgccttctggacagg

SEQ ID NO: 17775 - DNA, 18 bp, synthetic construct
  misc_feature 1..18: note = Artificial sequence related to HLA knockouts in cell therapy
  source 1..18: mol_type = other DNA
ggtgccttctggacagga

SEQ ID NO: 17776 - DNA, 18 bp, synthetic construct
  misc_feature 1..18: note = Artificial sequence related to HLA knockouts in cell therapy
  source 1..18: mol_type = other DNA
gtgccttctggacaggag

SEQ ID NO: 17777 - DNA, 18 bp, synthetic construct
  misc_feature 1..18: note = Artificial sequence related to HLA knockouts in cell therapy
  source 1..18: mol_type = other DNA
tgccttctggacaggagc

SEQ ID NO: 17778 - DNA, 18 bp, synthetic construct
  misc_feature 1..18: note = Artificial sequence related to HLA knockouts in cell therapy
  source 1..18: mol_type = other DNA
gccttctggacaggagca

SEQ ID NO: 17779 - DNA, 18 bp, synthetic construct
  misc_feature 1..18: note = Artificial sequence related to HLA knockouts in cell therapy
  source 1..18: mol_type = other DNA
ccttctggacaggagcag

SEQ ID NO: 17780 - DNA, 18 bp, synthetic construct
  misc_feature 1..18: note = Artificial sequence related to HLA knockouts in cell therapy
  source 1..18: mol_type = other DNA
acacctgccatgtgcagc

SEQ ID NO: 17781 - DNA, 18 bp, synthetic construct
  misc_feature 1..18: note = Artificial sequence related to HLA knockouts in cell therapy
  source 1..18: mol_type = other DNA
cacctgccatgtgcagca

SEQ ID NO: 17782 - DNA, 18 bp, synthetic construct
  misc_feature 1..18: note = Artificial sequence related to HLA knockouts in cell therapy
  source 1..18: mol_type = other DNA
cctgccatgtgcagcatg

SEQ ID NO: 17783 - DNA, 18 bp, synthetic construct
  misc_feature 1..18: note = Artificial sequence related to HLA knockouts in cell therapy
  source 1..18: mol_type = other DNA
gccatgtgcagcatgagg

SEQ ID NO: 17784 - DNA, 18 bp, synthetic construct
  misc_feature 1..18: note = Artificial sequence related to HLA knockouts in cell therapy
  source 1..18: mol_type = other DNA
ccatgtgcagcatgaggg

SEQ ID NO: 17785 - DNA, 18 bp, synthetic construct
  misc_feature 1..18: note = Artificial sequence related to HLA knockouts in cell therapy
  source 1..18: mol_type = other DNA
gcagcatgagggtttgcc

SEQ ID NO: 17786 - DNA, 18 bp, synthetic construct
  misc_feature 1..18: note = Artificial sequence related to HLA knockouts in cell therapy
  source 1..18: mol_type = other DNA
cagcatgagggtttgccc

SEQ ID NO: 17787 - DNA, 18 bp, synthetic construct
  misc_feature 1..18: note = Artificial sequence related to HLA knockouts in cell therapy
  source 1..18: mol_type = other DNA
tgagggtttgcccaagcc

SEQ ID NO: 17788 - DNA, 18 bp, synthetic construct
  misc_feature 1..18: note = Artificial sequence related to HLA knockouts in cell therapy
  source 1..18: mol_type = other DNA
gagggtttgcccaagccc

SEQ ID NO: 17789 - DNA, 18 bp, synthetic construct
  misc_feature 1..18: note = Artificial sequence related to HLA knockouts in cell therapy
  source 1..18: mol_type = other DNA
agggtttgcccaagcccc

SEQ ID NO: 17790 - DNA, 18 bp, synthetic construct
  misc_feature 1..18: note = Artificial sequence related to HLA knockouts in cell therapy
  source 1..18: mol_type = other DNA
gggtttgcccaagcccct

SEQ ID NO: 17791 - DNA, 18 bp, synthetic construct
  misc_feature 1..18: note = Artificial sequence related to HLA knockouts in cell therapy
  source 1..18: mol_type = other DNA
ggtttgcccaagcccctc

SEQ ID NO: 17792 - DNA, 18 bp, synthetic construct
  misc_feature 1..18: note = Artificial sequence related to HLA knockouts in cell therapy
  source 1..18: mol_type = other DNA
gtttgcccaagcccctca

SEQ ID NO: 17793 - DNA, 18 bp, synthetic construct
  misc_feature 1..18: note = Artificial sequence related to HLA knockouts in cell therapy
  source 1..18: mol_type = other DNA
tttgcccaagcccctcac

SEQ ID NO: 17794 - DNA, 18 bp, synthetic construct
  misc_feature 1..18: note = Artificial sequence related to HLA knockouts in cell therapy
  source 1..18: mol_type = other DNA
ttgcccaagcccctcacc

SEQ ID NO: 17795 - DNA, 18 bp, synthetic construct
  misc_feature 1..18: note = Artificial sequence related to HLA knockouts in cell therapy
  source 1..18: mol_type = other DNA
tgcccaagcccctcaccc

SEQ ID NO: 17796 - DNA, 18 bp, synthetic construct
  misc_feature 1..18: note = Artificial sequence related to HLA knockouts in cell therapy
  source 1..18: mol_type = other DNA
gcccaagcccctcaccct

SEQ ID NO: 17797 - DNA, 18 bp, synthetic construct
  misc_feature 1..18: note = Artificial sequence related to HLA knockouts in cell therapy
  source 1..18: mol_type = other DNA
cccaagcccctcaccctg

SEQ ID NO: 17798 - DNA, 18 bp, synthetic construct
  misc_feature 1..18: note = Artificial sequence related to HLA knockouts in cell therapy
  source 1..18: mol_type = other DNA
ccaagcccctcaccctga

SEQ ID NO: 17799 - DNA, 18 bp, synthetic construct
  misc_feature 1..18: note = Artificial sequence related to HLA knockouts in cell therapy
  source 1..18: mol_type = other DNA
caagcccctcaccctgag

SEQ ID NO: 17800 - DNA, 18 bp, synthetic construct
  misc_feature 1..18: note = Artificial sequence related to HLA knockouts in cell therapy
  source 1..18: mol_type = other DNA
aagcccctcaccctgaga

SEQ ID NO: 17801 - DNA, 18 bp, synthetic construct
  misc_feature 1..18: note = Artificial sequence related to HLA knockouts in cell therapy
  source 1..18: mol_type = other DNA
agcccctcaccctgagat

SEQ ID NO: 17802 - DNA, 18 bp, synthetic construct
  misc_feature 1..18: note = Artificial sequence related to HLA knockouts in cell therapy
  source 1..18: mol_type = other DNA
gcccctcaccctgagatg

SEQ ID NO: 17803 - DNA, 18 bp, synthetic construct
  misc_feature 1..18: note = Artificial sequence related to HLA knockouts in cell therapy
  source 1..18: mol_type = other DNA
cccctcaccctgagatgg

SEQ ID NO: 17804 - DNA, 18 bp, synthetic construct
  misc_feature 1..18: note = Artificial sequence related to HLA knockouts in cell therapy
  source 1..18: mol_type = other DNA
ccctcaccctgagatggg

SEQ ID NO: 17805 - DNA, 18 bp, synthetic construct
  misc_feature 1..18: note = Artificial sequence related to HLA knockouts in cell therapy
  source 1..18: mol_type = other DNA
cctcaccctgagatggga

SEQ ID NO: 17806 - DNA, 18 bp, synthetic construct
  misc_feature 1..18: note = Artificial sequence related to HLA knockouts in cell therapy
  source 1..18: mol_type = other DNA
ctcaccctgagatgggag

SEQ ID NO: 17807 - DNA, 18 bp, synthetic construct
  misc_feature 1..18: note = Artificial sequence related to HLA knockouts in cell therapy
  source 1..18: mol_type = other DNA
tcaccctgagatgggagc

SEQ ID NO: 17808 - DNA, 18 bp, synthetic construct
  misc_feature 1..18: note = Artificial sequence related to HLA knockouts in cell therapy
  source 1..18: mol_type = other DNA
caccctgagatgggagcc

SEQ ID NO: 17809 - DNA, 18 bp, synthetic construct
  misc_feature 1..18: note = Artificial sequence related to HLA knockouts in cell therapy
  source 1..18: mol_type = other DNA
accctgagatgggagccg

SEQ ID NO: 17810 - DNA, 18 bp, synthetic construct
  misc_feature 1..18: note = Artificial sequence related to HLA knockouts in cell therapy
  source 1..18: mol_type = other DNA
ccctgagatgggagccgt

SEQ ID NO: 17811 - DNA, 18 bp, synthetic construct
  misc_feature 1..18: note = Artificial sequence related to HLA knockouts in cell therapy
  source 1..18: mol_type = other DNA
cctgagatgggagccgtc

SEQ ID NO: 17812 - DNA, 18 bp, synthetic construct
  misc_feature 1..18: note = Artificial sequence related to HLA knockouts in cell therapy
  source 1..18: mol_type = other DNA
ctgagatgggagccgtct

SEQ ID NO: 17813 - DNA, 18 bp, synthetic construct
  misc_feature 1..18: note = Artificial sequence related to HLA knockouts in cell therapy
  source 1..18: mol_type = other DNA
gagatgggagccgtcttc

SEQ ID NO: 17814 - DNA, 18 bp, synthetic construct
  misc_feature 1..18: note = Artificial sequence related to HLA knockouts in cell therapy
  source 1..18: mol_type = other DNA
agatgggagccgtcttcc

SEQ ID NO: 17815 - DNA, 18 bp, synthetic construct
  misc_feature 1..18: note = Artificial sequence related to HLA knockouts in cell therapy
  source 1..18: mol_type = other DNA
gatgggagccgtcttccc

SEQ ID NO: 17816 - DNA, 18 bp, synthetic construct
  misc_feature 1..18: note = Artificial sequence related to HLA knockouts in cell therapy
  source 1..18: mol_type = other DNA
atgggagccgtcttccca

SEQ ID NO: 17817 - DNA, 18 bp, synthetic construct
  misc_feature 1..18: note = Artificial sequence related to HLA knockouts in cell therapy
  source 1..18: mol_type = other DNA
tgggagccgtcttcccag

SEQ ID NO: 17818 - DNA, 18 bp, synthetic construct
  misc_feature 1..18: note = Artificial sequence related to HLA knockouts in cell therapy
  source 1..18: mol_type = other DNA
gggagccgtcttcccagc

SEQ ID NO: 17819 - DNA, 18 bp, synthetic construct
  misc_feature 1..18: note = Artificial sequence related to HLA knockouts in cell therapy
  source 1..18: mol_type = other DNA
ggagccgtcttcccagcc

SEQ ID NO: 17820 - DNA, 18 bp, synthetic construct
  misc_feature 1..18: note = Artificial sequence related to HLA knockouts in cell therapy
  source 1..18: mol_type = other DNA
gagccgtcttcccagccc

SEQ ID NO: 17821 - DNA, 18 bp, synthetic construct
  misc_feature 1..18: note = Artificial sequence related to HLA knockouts in cell therapy
  source 1..18: mol_type = other DNA
agccgtcttcccagccca

SEQ ID NO: 17822 - DNA, 18 bp, synthetic construct
  misc_feature 1..18: note = Artificial sequence related to HLA knockouts in cell therapy
  source 1..18: mol_type = other DNA
gccgtcttcccagcccac

SEQ ID NO: 17823 - DNA, 18 bp, synthetic construct
  misc_feature 1..18: note = Artificial sequence related to HLA knockouts in cell therapy
  source 1..18: mol_type = other DNA
ccgtcttcccagcccacc

SEQ ID NO: 17824 - DNA, 18 bp, synthetic construct
  misc_feature 1..18: note = Artificial sequence related to HLA knockouts in cell therapy
  source 1..18: mol_type = other DNA
cgtcttcccagcccacca

SEQ ID NO: 17825 - DNA, 18 bp, synthetic construct
  misc_feature 1..18: note = Artificial sequence related to HLA knockouts in cell therapy
  source 1..18: mol_type = other DNA
gtcttcccagcccaccat

SEQ ID NO: 17826 - DNA, 18 bp, synthetic construct
  misc_feature 1..18: note = Artificial sequence related to HLA knockouts in cell therapy
  source 1..18: mol_type = other DNA
tcttcccagcccaccatc

SEQ ID NO: 17827 - DNA, 18 bp, synthetic construct
  misc_feature 1..18: note = Artificial sequence related to HLA knockouts in cell therapy
  source 1..18: mol_type = other DNA
cttcccagcccaccatcc

SEQ ID NO: 17828 - DNA, 18 bp, synthetic construct
  misc_feature 1..18: note = Artificial sequence related to HLA knockouts in cell therapy
  source 1..18: mol_type = other DNA
ttcccagcccaccatccc

SEQ ID NO: 17829 - DNA, 18 bp, synthetic construct
  misc_feature 1..18: note = Artificial sequence related to HLA knockouts in cell therapy
  source 1..18: mol_type = other DNA
tcccagcccaccatcccc

SEQ ID NO: 17830 - DNA, 18 bp, synthetic construct
  misc_feature 1..18: note = Artificial sequence related to HLA knockouts in cell therapy
  source 1..18: mol_type = other DNA
cccagcccaccatcccca

SEQ ID NO: 17831 - DNA, 18 bp, synthetic construct
  misc_feature 1..18: note = Artificial sequence related to HLA knockouts in cell therapy
  source 1..18: mol_type = other DNA
ccagcccaccatccccat

SEQ ID NO: 17832 - DNA, 18 bp, synthetic construct
  misc_feature 1..18: note = Artificial sequence related to HLA knockouts in cell therapy
  source 1..18: mol_type = other DNA
cagcccaccatccccatc

SEQ ID NO: 17833 - DNA, 18 bp, synthetic construct
  misc_feature 1..18: note = Artificial sequence related to HLA knockouts in cell therapy
  source 1..18: mol_type = other DNA
agcccaccatccccatcg

SEQ ID NO: 17834 - DNA, 18 bp, synthetic construct
  misc_feature 1..18: note = Artificial sequence related to HLA knockouts in cell therapy
  source 1..18: mol_type = other DNA
gcccaccatccccatcgt

SEQ ID NO: 17835 - DNA, 18 bp, synthetic construct
  misc_feature 1..18: note = Artificial sequence related to HLA knockouts in cell therapy
  source 1..18: mol_type = other DNA
cccaccatccccatcgtg

SEQ ID NO: 17836 - DNA, 18 bp, synthetic construct
  misc_feature 1..18: note = Artificial sequence related to HLA knockouts in cell therapy
  source 1..18: mol_type = other DNA
ccaccatccccatcgtgg

SEQ ID NO: 17837 - DNA, 18 bp, synthetic construct
  misc_feature 1..18: note = Artificial sequence related to HLA knockouts in cell therapy
  source 1..18: mol_type = other DNA
caccatccccatcgtggg

SEQ ID NO: 17838 - DNA, 18 bp, synthetic construct
  misc_feature 1..18: note = Artificial sequence related to HLA knockouts in cell therapy
  source 1..18: mol_type = other DNA
accatccccatcgtgggc

SEQ ID NO: 17839 - DNA, 18 bp, synthetic construct
  misc_feature 1..18: note = Artificial sequence related to HLA knockouts in cell therapy
  source 1..18: mol_type = other DNA
ccatccccatcgtgggca

SEQ ID NO: 17840 - DNA, 18 bp, synthetic construct
  misc_feature 1..18: note = Artificial sequence related to HLA knockouts in cell therapy
  source 1..18: mol_type = other DNA
catccccatcgtgggcat

SEQ ID NO: 17841 - DNA, 18 bp, synthetic construct
  misc_feature 1..18: note = Artificial sequence related to HLA knockouts in cell therapy
  source 1..18: mol_type = other DNA
atccccatcgtgggcatc

SEQ ID NO: 17842 - DNA, 18 bp, synthetic construct
  misc_feature 1..18: note = Artificial sequence related to HLA knockouts in cell therapy
  source 1..18: mol_type = other DNA
tccccatcgtgggcatca

SEQ ID NO: 17843 - DNA, 18 bp, synthetic construct
  misc_feature 1..18: note = Artificial sequence related to HLA knockouts in cell therapy
  source 1..18: mol_type = other DNA
ccccatcgtgggcatcat

SEQ ID NO: 17844 - DNA, 18 bp, synthetic construct
  misc_feature 1..18: note = Artificial sequence related to HLA knockouts in cell therapy
  source 1..18: mol_type = other DNA
cgtgggcatcattgctgg

SEQ ID NO: 17845 - DNA, 18 bp, synthetic construct
  misc_feature 1..18: note = Artificial sequence related to HLA knockouts in cell therapy
  source 1..18: mol_type = other DNA
gtgggcatcattgctggc

SEQ ID NO: 17846 - DNA, 18 bp, synthetic construct
  misc_feature 1..18: note = Artificial sequence related to HLA knockouts in cell therapy
  source 1..18: mol_type = other DNA
tgggcatcattgctggcc

SEQ ID NO: 17847 - DNA, 18 bp, synthetic construct
  misc_feature 1..18: note = Artificial sequence related to HLA knockouts in cell therapy
  source 1..18: mol_type = other DNA
gggcatcattgctggcct

SEQ ID NO: 17848 - DNA, 18 bp, synthetic construct
  misc_feature 1..18: note = Artificial sequence related to HLA knockouts in cell therapy
  source 1..18: mol_type = other DNA
ggcatcattgctggcctg

SEQ ID NO: 17849 - DNA, 18 bp, synthetic construct
  misc_feature 1..18: note = Artificial sequence related to HLA knockouts in cell therapy
  source 1..18: mol_type = other DNA
gcatcattgctggcctgg

SEQ ID NO: 17850 - DNA, 18 bp, synthetic construct
  misc_feature 1..18: note = Artificial sequence related to HLA knockouts in cell therapy
  source 1..18: mol_type = other DNA
tcactggagctgtggtcg

SEQ ID NO: 17851 - DNA, 18 bp, synthetic construct
  misc_feature 1..18: note = Artificial sequence related to HLA knockouts in cell therapy
  source 1..18: mol_type = other DNA
cactggagctgtggtcgc

SEQ ID NO: 17852 - DNA, 18 bp, synthetic construct
  misc_feature 1..18: note = Artificial sequence related to HLA knockouts in cell therapy
  source 1..18: mol_type = other DNA
actggagctgtggtcgct

SEQ ID NO: 17853 - DNA, 18 bp, synthetic construct
  misc_feature 1..18: note = Artificial sequence related to HLA knockouts in cell therapy
  source 1..18: mol_type = other DNA
ctggagctgtggtcgctg

SEQ ID NO: 17854 - DNA, 18 bp, synthetic construct
  misc_feature 1..18: note = Artificial sequence related to HLA knockouts in cell therapy
  source 1..18: mol_type = other DNA
tggagctgtggtcgctgc

SEQ ID NO: 17855 - DNA, 18 bp, synthetic construct
  misc_feature 1..18: note = Artificial sequence related to HLA knockouts in cell therapy
  source 1..18: mol_type = other DNA
ggagctgtggtcgctgct

SEQ ID NO: 17856 - DNA, 18 bp, synthetic construct
  misc_feature 1..18: note = Artificial sequence related to HLA knockouts in cell therapy
  source 1..18: mol_type = other DNA
gagctgtggtcgctgctg

SEQ ID NO: 17857 - DNA, 18 bp, synthetic construct
  misc_feature 1..18: note = Artificial sequence related to HLA knockouts in cell therapy
  source 1..18: mol_type = other DNA
agctgtggtcgctgctgt

SEQ ID NO: 17858 - DNA, 18 bp, synthetic construct
  misc_feature 1..18: note = Artificial sequence related to HLA knockouts in cell therapy
  source 1..18: mol_type = other DNA
gctgtggtcgctgctgtg

SEQ ID NO: 17859 - DNA, 18 bp, synthetic construct
  misc_feature 1..18: note = Artificial sequence related to HLA knockouts in cell therapy
  source 1..18: mol_type = other DNA
ctgtggtcgctgctgtga

SEQ ID NO: 17860 - DNA, 18 bp, synthetic construct
  misc_feature 1..18: note = Artificial sequence related to HLA knockouts in cell therapy
  source 1..18: mol_type = other DNA
gtggtcgctgctgtgatg

SEQ ID NO: 17861 - DNA, 18 bp, synthetic construct
  misc_feature 1..18: note = Artificial sequence related to HLA knockouts in cell therapy
  source 1..18: mol_type = other DNA
ggtcgctgctgtgatgtg

SEQ ID NO: 17862 - DNA, 18 bp, synthetic construct
  misc_feature 1..18: note = Artificial sequence related to HLA knockouts in cell therapy
  source 1..18: mol_type = other DNA
gtcgctgctgtgatgtgg

SEQ ID NO: 17863 - DNA, 18 bp, synthetic construct
  misc_feature 1..18: note = Artificial sequence related to HLA knockouts in cell therapy
  source 1..18: mol_type = other DNA
cgctgctgtgatgtggag

SEQ ID NO: 17864 - DNA, 18 bp, synthetic construct
  misc_feature 1..18: note = Artificial sequence related to HLA knockouts in cell therapy
  source 1..18: mol_type = other DNA
gctgctgtgatgtggagg

SEQ ID NO: 17865 - DNA, 18 bp, synthetic construct
  misc_feature 1..18: note = Artificial sequence related to HLA knockouts in cell therapy
  source 1..18: mol_type = other DNA
gctgtgatgtggaggagg

SEQ ID NO: 17866 - DNA, 18 bp, synthetic construct
  misc_feature 1..18: note = Artificial sequence related to HLA knockouts in cell therapy
  source 1..18: mol_type = other DNA
gtggaggaggaagagctc

SEQ ID NO: 17867 - DNA, 18 bp, synthetic construct
  misc_feature 1..18: note = Artificial sequence related to HLA knockouts in cell therapy
  source 1..18: mol_type = other DNA
ggaggaggaagagctcag

SEQ ID NO: 17868 - DNA, 18 bp, synthetic construct
  misc_feature 1..18: note = Artificial sequence related to HLA knockouts in cell therapy
  source 1..18: mol_type = other DNA
ggagggagctactctcag

SEQ ID NO: 17869 - DNA, 18 bp, synthetic construct
  misc_feature 1..18: note = Artificial sequence related to HLA knockouts in cell therapy
  source 1..18: mol_type = other DNA
gagggagctactctcagg

SEQ ID NO: 17870 - DNA, 18 bp, synthetic construct
  misc_feature 1..18: note = Artificial sequence related to HLA knockouts in cell therapy
  source 1..18: mol_type = other DNA
agggagctactctcaggc

SEQ ID NO: 17871 - DNA, 18 bp, synthetic construct
  misc_feature 1..18: note = Artificial sequence related to HLA knockouts in cell therapy
  source 1..18: mol_type = other DNA
gggagctactctcaggct

SEQ ID NO: 17872 - DNA, 18 bp, synthetic construct
  misc_feature 1..18: note = Artificial sequence related to HLA knockouts in cell therapy
  source 1..18: mol_type = other DNA
ggagctactctcaggctg

SEQ ID NO: 17873 - DNA, 18 bp, synthetic construct
  misc_feature 1..18: note = Artificial sequence related to HLA knockouts in cell therapy
  source 1..18: mol_type = other DNA
gagctactctcaggctgc

SEQ ID NO: 17874 - DNA, 18 bp, synthetic construct
  misc_feature 1..18: note = Artificial sequence related to HLA knockouts in cell therapy
  source 1..18: mol_type = other DNA
ctctcaggctgcaagcag

SEQ ID NO: 17875 - DNA, 18 bp, synthetic construct
  misc_feature 1..18: note = Artificial sequence related to HLA knockouts in cell therapy
  source 1..18: mol_type = other DNA
ctcaggctgcaagcagtg

SEQ ID NO: 17876 - DNA, 18 bp, synthetic construct
  misc_feature 1..18: note = Artificial sequence related to HLA knockouts in cell therapy
  source 1..18: mol_type = other DNA
caggctgcaagcagtgac

SEQ ID NO: 17877 - DNA, 18 bp, synthetic construct
  misc_feature 1..18: note = Artificial sequence related to HLA knockouts in cell therapy
  source 1..18: mol_type = other DNA
ggctgcaagcagtgacag

SEQ ID NO: 17878 - DNA, 18 bp, synthetic construct
  misc_feature 1..18: note = Artificial sequence related to HLA knockouts in cell therapy
  source 1..18: mol_type = other DNA
gcaagcagtgacagtgcc

SEQ ID NO: 17879 - DNA, 18 bp, synthetic construct
  misc_feature 1..18: note = Artificial sequence related to HLA knockouts in cell therapy
  source 1..18: mol_type = other DNA
caagcagtgacagtgccc

SEQ ID NO: 17880 - DNA, 18 bp, synthetic construct
  misc_feature 1..18: note = Artificial sequence related to HLA knockouts in cell therapy
  source 1..18: mol_type = other DNA
agcagtgacagtgcccag

SEQ ID NO: 17881 - DNA, 18 bp, synthetic construct
  misc_feature 1..18: note = Artificial sequence related to HLA knockouts in cell therapy
  source 1..18: mol_type = other DNA
gcagtgacagtgcccagg

SEQ ID NO: 17882 - DNA, 18 bp, synthetic construct
  misc_feature 1..18: note = Artificial sequence related to HLA knockouts in cell therapy
  source 1..18: mol_type = other DNA
cagtgacagtgcccaggg

SEQ ID NO: 17883 - DNA, 18 bp, synthetic construct
  misc_feature 1..18: note = Artificial sequence related to HLA knockouts in cell therapy
  source 1..18: mol_type = other DNA
agtgacagtgcccagggc

SEQ ID NO: 17884 - DNA, 18 bp, synthetic construct
  misc_feature 1..18: note = Artificial sequence related to HLA knockouts in cell therapy
  source 1..18: mol_type = other DNA
gtgacagtgcccagggct

SEQ ID NO: 17885 - DNA, 18 bp, synthetic construct
  misc_feature 1..18: note = Artificial sequence related to HLA knockouts in cell therapy
  source 1..18: mol_type = other DNA
tgacagtgcccagggctc

SEQ ID NO: 17886 - DNA, 18 bp, synthetic construct
  misc_feature 1..18: note = Artificial sequence related to HLA knockouts in cell therapy
  source 1..18: mol_type = other DNA
gacagtgcccagggctct

SEQ ID NO: 17887 - DNA, 18 bp, synthetic construct
  misc_feature 1..18: note = Artificial sequence related to HLA knockouts in cell therapy
  source 1..18: mol_type = other DNA
acagtgcccagggctctg

SEQ ID NO: 17888 - DNA, 18 bp, synthetic construct
  misc_feature 1..18: note = Artificial sequence related to HLA knockouts in cell therapy
  source 1..18: mol_type = other DNA
cagtgcccagggctctga

SEQ ID NO: 17889 - DNA, 18 bp, synthetic construct
  misc_feature 1..18: note = Artificial sequence related to HLA knockouts in cell therapy
  source 1..18: mol_type = other DNA
agtgcccagggctctgat

SEQ ID NO: 17890 - DNA, 18 bp, synthetic construct
  misc_feature 1..18: note = Artificial sequence related to HLA knockouts in cell therapy
  source 1..18: mol_type = other DNA
gtgcccagggctctgatg

SEQ ID NO: 17891 - DNA, 18 bp, synthetic construct
  misc_feature 1..18: note = Artificial sequence related to HLA knockouts in cell therapy
  source 1..18: mol_type = other DNA
tgcccagggctctgatgt

SEQ ID NO: 17892 - DNA, 18 bp, synthetic construct
  misc_feature 1..18: note = Artificial sequence related to HLA knockouts in cell therapy
  source 1..18: mol_type = other DNA
gcccagggctctgatgtg

SEQ ID NO: 17893 - DNA, 18 bp, synthetic construct
  misc_feature 1..18: note = Artificial sequence related to HLA knockouts in cell therapy
  source 1..18: mol_type = other DNA
cccagggctctgatgtgt

SEQ ID NO: 17894 - DNA, 18 bp, synthetic construct
  misc_feature 1..18: note = Artificial sequence related to HLA knockouts in cell therapy
  source 1..18: mol_type = other DNA
ccagggctctgatgtgtc

SEQ ID NO: 17895 - DNA, 18 bp, synthetic construct
  misc_feature 1..18: note = Artificial sequence related to HLA knockouts in cell therapy
  source 1..18: mol_type = other DNA
gacagctgccttgtgtgg

SEQ ID NO: 17896 - DNA, 18 bp, synthetic construct
  misc_feature 1..18: note = Artificial sequence related to HLA knockouts in cell therapy
  source 1..18: mol_type = other DNA
acagctgccttgtgtggg

SEQ ID NO: 17897 - DNA, 18 bp, synthetic construct
  misc_feature 1..18: note = Artificial sequence related to HLA knockouts in cell therapy
  source 1..18: mol_type = other DNA
cagctgccttgtgtggga

SEQ ID NO: 17898 - DNA, 18 bp, synthetic construct
  misc_feature 1..18: note = Artificial sequence related to HLA knockouts in cell therapy
  source 1..18: mol_type = other DNA
agctgccttgtgtgggac

SEQ ID NO: 17899 - DNA, 18 bp, synthetic construct
  misc_feature 1..18: note = Artificial sequence related to HLA knockouts in cell therapy
  source 1..18: mol_type = other DNA
gctgccttgtgtgggact

SEQ ID NO: 17900 - DNA, 18 bp, synthetic construct
  misc_feature 1..18: note = Artificial sequence related to HLA knockouts in cell therapy
  source 1..18: mol_type = other DNA
ctgccttgtgtgggactg

SEQ ID NO: 17901 - DNA, 18 bp, synthetic construct
  misc_feature 1..18: note = Artificial sequence related to HLA knockouts in cell therapy
  source 1..18: mol_type = other DNA
gccttgtgtgggactgag

SEQ ID NO: 17902 - DNA, 18 bp, synthetic construct
  misc_feature 1..18: note = Artificial sequence related to HLA knockouts in cell therapy
  source 1..18: mol_type = other DNA
tgtgtgggactgagaggc

SEQ ID NO: 17903 - DNA, 18 bp, synthetic construct
  misc_feature 1..18: note = Artificial sequence related to HLA knockouts in cell therapy
  source 1..18: mol_type = other DNA
gtgtgggactgagaggca

SEQ ID NO: 17904 - DNA, 18 bp, synthetic construct
  misc_feature 1..18: note = Artificial sequence related to HLA knockouts in cell therapy
  source 1..18: mol_type = other DNA
gtgggactgagaggcaag

SEQ ID NO: 17905 - DNA, 18 bp, synthetic construct
  misc_feature 1..18: note = Artificial sequence related to HLA knockouts in cell therapy
  source 1..18: mol_type = other DNA
gggactgagaggcaagag

SEQ ID NO: 17906 - DNA, 18 bp, synthetic construct
  misc_feature 1..18: note = Artificial sequence related to HLA knockouts in cell therapy
  source 1..18: mol_type = other DNA
gttgttcctgcccttccc

SEQ ID NO: 17907 - DNA, 18 bp, synthetic construct
  misc_feature 1..18: note = Artificial sequence related to HLA knockouts in cell therapy
  source 1..18: mol_type = other DNA
cctgcccttccctttgtg

SEQ ID NO: 17908 - DNA, 18 bp, synthetic construct
  misc_feature 1..18: note = Artificial sequence related to HLA knockouts in cell therapy
  source 1..18: mol_type = other DNA
ggcacctgcatgtgtctg

SEQ ID NO: 17909 - DNA, 18 bp, synthetic construct
  misc_feature 1..18: note = Artificial sequence related to HLA knockouts in cell therapy
  source 1..18: mol_type = other DNA
atgtgaggaggtggggag

SEQ ID NO: 17910 - DNA, 18 bp, synthetic construct
  misc_feature 1..18: note = Artificial sequence related to HLA knockouts in cell therapy
  source 1..18: mol_type = other DNA
tgtgaggaggtggggaga

SEQ ID NO: 17911 - DNA, 18 bp, synthetic construct
  misc_feature 1..18: note = Artificial sequence related to HLA knockouts in cell therapy
  source 1..18: mol_type = other DNA
gtgaggaggtggggagac

SEQ ID NO: 17912 - DNA, 18 bp, synthetic construct
  misc_feature 1..18: note = Artificial sequence related to HLA knockouts in cell therapy
  source 1..18: mol_type = other DNA
tgaggaggtggggagacc

SEQ ID NO: 17913 - DNA, 18 bp, synthetic construct
  misc_feature 1..18: note = Artificial sequence related to HLA knockouts in cell therapy
  source 1..18: mol_type = other DNA
gaggaggtggggagacca

SEQ ID NO: 17914 - DNA, 18 bp, synthetic construct
  misc_feature 1..18: note = Artificial sequence related to HLA knockouts in cell therapy
  source 1..18: mol_type = other DNA
aggaggtggggagaccac

SEQ ID NO: 17915 - DNA, 18 bp, synthetic construct
  misc_feature 1..18: note = Artificial sequence related to HLA knockouts in cell therapy
  source 1..18: mol_type = other DNA
ggaggtggggagaccacc

SEQ ID NO: 17916 - DNA, 18 bp, synthetic construct
  misc_feature 1..18: note = Artificial sequence related to HLA knockouts in cell therapy
  source 1..18: mol_type = other DNA
gaggtggggagaccaccc

SEQ ID NO: 17917 - DNA, 18 bp, synthetic construct
  misc_feature 1..18: note = Artificial sequence related to HLA knockouts in cell therapy
  source 1..18: mol_type = other DNA
aggtggggagaccacccc

SEQ ID NO: 17918 - DNA, 18 bp, synthetic construct
  misc_feature 1..18: note = Artificial sequence related to HLA knockouts in cell therapy
  source 1..18: mol_type = other DNA
ggtggggagaccacccca

SEQ ID NO: 17919 - DNA, 18 bp, synthetic construct
  misc_feature 1..18: note = Artificial sequence related to HLA knockouts in cell therapy
  source 1..18: mol_type = other DNA
gtggggagaccaccccac

SEQ ID NO: 17920 - DNA, 18 bp, synthetic construct
  misc_feature 1..18: note = Artificial sequence related to HLA knockouts in cell therapy
  source 1..18: mol_type = other DNA
tggggagaccaccccacc

SEQ ID NO: 17921 - DNA, 18 bp, synthetic construct
  misc_feature 1..18: note = Artificial sequence related to HLA knockouts in cell therapy
  source 1..18: mol_type = other DNA
ggggagaccaccccaccc

SEQ ID NO: 17922 - DNA, 18 bp, synthetic construct
  misc_feature 1..18: note = Artificial sequence related to HLA knockouts in cell therapy
  source 1..18: mol_type = other DNA
gggagaccaccccacccc

SEQ ID NO: 17923 - DNA, 18 bp, synthetic construct
  misc_feature 1..18: note = Artificial sequence related to HLA knockouts in cell therapy
  source 1..18: mol_type = other DNA
ggagaccaccccaccccc

SEQ ID NO: 17924 - DNA, 18 bp, synthetic construct
  misc_feature 1..18: note = Artificial sequence related to HLA knockouts in cell therapy
  source 1..18: mol_type = other DNA
gagaccaccccaccccca

SEQ ID NO: 17925 - DNA, 18 bp, synthetic construct
  misc_feature 1..18: note = Artificial sequence related to HLA knockouts in cell therapy
  source 1..18: mol_type = other DNA
agaccaccccacccccat

SEQ ID NO: 17926 - DNA, 18 bp, synthetic construct
  misc_feature 1..18: note = Artificial sequence related to HLA knockouts in cell therapy
  source 1..18: mol_type = other DNA
gaccaccccacccccatg

SEQ ID NO: 17927 - DNA, 18 bp, synthetic construct
  misc_feature 1..18: note = Artificial sequence related to HLA knockouts in cell therapy
  source 1..18: mol_type = other DNA
accaccccacccccatgt

SEQ ID NO: 17928 - DNA, 18 bp, synthetic construct
  misc_feature 1..18: note = Artificial sequence related to HLA knockouts in cell therapy
  source 1..18: mol_type = other DNA
ccaccccacccccatgtc

SEQ ID NO: 17929 - DNA, 18 bp, synthetic construct
  misc_feature 1..18: note = Artificial sequence related to HLA knockouts in cell therapy
  source 1..18: mol_type = other DNA
caccccacccccatgtcc

SEQ ID NO: 17930 - DNA, 18 bp, synthetic construct
  misc_feature 1..18: note = Artificial sequence related to HLA knockouts in cell therapy
  source 1..18: mol_type = other DNA
accccacccccatgtcca

SEQ ID NO: 17931 - DNA, 18 bp, synthetic construct
  misc_feature 1..18: note = Artificial sequence related to HLA knockouts in cell therapy
  source 1..18: mol_type = other DNA
ccccacccccatgtccac

SEQ ID NO: 17932 - DNA, 18 bp, synthetic construct
  misc_feature 1..18: note = Artificial sequence related to HLA knockouts in cell therapy
  source 1..18: mol_type = other DNA
cccacccccatgtccacc

SEQ ID NO: 17933 - DNA, 18 bp, synthetic construct
  misc_feature 1..18: note = Artificial sequence related to HLA knockouts in cell therapy
  source 1..18: mol_type = other DNA
ccacccccatgtccacca

SEQ ID NO: 17934 - DNA, 18 bp, synthetic construct
  misc_feature 1..18: note = Artificial sequence related to HLA knockouts in cell therapy
  source 1..18: mol_type = other DNA
cacccccatgtccaccat

SEQ ID NO: 17935 - DNA, 18 bp, synthetic construct
  misc_feature 1..18: note = Artificial sequence related to HLA knockouts in cell therapy
  source 1..18: mol_type = other DNA
acccccatgtccaccatg

SEQ ID NO: 17936 - DNA, 18 bp, synthetic construct
  misc_feature 1..18: note = Artificial sequence related to HLA knockouts in cell therapy
  source 1..18: mol_type = other DNA
cccccatgtccaccatga

SEQ ID NO: 17937 - DNA, 18 bp, synthetic construct
  misc_feature 1..18: note = Artificial sequence related to HLA knockouts in cell therapy
  source 1..18: mol_type = other DNA
ccccatgtccaccatgac

SEQ ID NO: 17938 - DNA, 18 bp, synthetic construct
  misc_feature 1..18: note = Artificial sequence related to HLA knockouts in cell therapy
  source 1..18: mol_type = other DNA
cccatgtccaccatgacc

SEQ ID NO: 17939 - DNA, 18 bp, synthetic construct
  misc_feature 1..18: note = Artificial sequence related to HLA knockouts in cell therapy
  source 1..18: mol_type = other DNA
ccatgtccaccatgaccc

SEQ ID NO: 17940 - DNA, 18 bp, synthetic construct
  misc_feature 1..18: note = Artificial sequence related to HLA knockouts in cell therapy
  source 1..18: mol_type = other DNA
ccaccatgaccctcttcc

SEQ ID NO: 17941 - DNA, 18 bp, synthetic construct
  misc_feature 1..18: note = Artificial sequence related to HLA knockouts in cell therapy
  source 1..18: mol_type = other DNA
caccatgaccctcttccc

SEQ ID NO: 17942 - DNA, 18 bp, synthetic construct
  misc_feature 1..18: note = Artificial sequence related to HLA knockouts in cell therapy
  source 1..18: mol_type = other DNA
ccatgaccctcttcccac

SEQ ID NO: 17943 - DNA, 18 bp, synthetic construct
  misc_feature 1..18: note = Artificial sequence related to HLA knockouts in cell therapy
  source 1..18: mol_type = other DNA
catgaccctcttcccacg

SEQ ID NO: 17944 - DNA, 18 bp, synthetic construct
  misc_feature 1..18: note = Artificial sequence related to HLA knockouts in cell therapy
  source 1..18: mol_type = other DNA
atgaccctcttcccacgc

SEQ ID NO: 17945 - DNA, 18 bp, synthetic construct
  misc_feature 1..18: note = Artificial sequence related to HLA knockouts in cell therapy
  source 1..18: mol_type = other DNA
tgaccctcttcccacgct

SEQ ID NO: 17946 - DNA, 18 bp, synthetic construct
  misc_feature 1..18: note = Artificial sequence related to HLA knockouts in cell therapy
  source 1..18: mol_type = other DNA
gaccctcttcccacgctg

SEQ ID NO: 17947 - DNA, 18 bp, synthetic construct
  misc_feature 1..18: note = Artificial sequence related to HLA knockouts in cell therapy
  source 1..18: mol_type = other DNA
accctcttcccacgctga

SEQ ID NO: 17948 - DNA, 18 bp, synthetic construct
  misc_feature 1..18: note = Artificial sequence related to HLA knockouts in cell therapy
  source 1..18: mol_type = other DNA
ccctcttcccacgctgac

SEQ ID NO: 17949 - DNA, 18 bp, synthetic construct
  misc_feature 1..18: note = Artificial sequence related to HLA knockouts in cell therapy
  source 1..18: mol_type = other DNA
cctcttcccacgctgacc

SEQ ID NO: 17950 - DNA, 18 bp, synthetic construct
  misc_feature 1..18: note = Artificial sequence related to HLA knockouts in cell therapy
  source 1..18: mol_type = other DNA
ctcttcccacgctgacct

SEQ ID NO: 17951 - DNA, 18 bp, synthetic construct
  misc_feature 1..18: note = Artificial sequence related to HLA knockouts in cell therapy
  source 1..18: mol_type = other DNA
tcttcccacgctgacctg

SEQ ID NO: 17952 - DNA, 18 bp, synthetic construct
  misc_feature 1..18: note = Artificial sequence related to HLA knockouts in cell therapy
  source 1..18: mol_type = other DNA
cttcccacgctgacctgt

SEQ ID NO: 17953 - DNA, 18 bp, synthetic construct
  misc_feature 1..18: note = Artificial sequence related to HLA knockouts in cell therapy
  source 1..18: mol_type = other DNA
ttcccacgctgacctgtg

SEQ ID NO: 17954 - DNA, 18 bp, synthetic construct
  misc_feature 1..18: note = Artificial sequence related to HLA knockouts in cell therapy
  source 1..18: mol_type = other DNA
tcccacgctgacctgtgc

SEQ ID NO: 17955 - DNA, 18 bp, synthetic construct
  misc_feature 1..18: note = Artificial sequence related to HLA knockouts in cell therapy
  source 1..18: mol_type = other DNA
cccacgctgacctgtgct

SEQ ID NO: 17956 - DNA, 18 bp, synthetic construct
  misc_feature 1..18: note = Artificial sequence related to HLA knockouts in cell therapy
  source 1..18: mol_type = other DNA
ccacgctgacctgtgctc

SEQ ID NO: 17957 - DNA, 18 bp, synthetic construct
  misc_feature 1..18: note = Artificial sequence related to HLA knockouts in cell therapy
  source 1..18: mol_type = other DNA
cacgctgacctgtgctcc

SEQ ID NO: 17958 - DNA, 18 bp, synthetic construct
  misc_feature 1..18: note = Artificial sequence related to HLA knockouts in cell therapy
  source 1..18: mol_type = other DNA
acgctgacctgtgctccc

SEQ ID NO: 17959 - DNA, 18 bp, synthetic construct
  misc_feature 1..18: note = Artificial sequence related to HLA knockouts in cell therapy
  source 1..18: mol_type = other DNA
cgctgacctgtgctccct

SEQ ID NO: 17960 - DNA, 18 bp, synthetic construct
  misc_feature 1..18: note = Artificial sequence related to HLA knockouts in cell therapy
  source 1..18: mol_type = other DNA
gctgacctgtgctccctc

SEQ ID NO: 17961 - DNA, 18 bp, synthetic construct
  misc_feature 1..18: note = Artificial sequence related to HLA knockouts in cell therapy
  source 1..18: mol_type = other DNA
ctgacctgtgctccctcc

SEQ ID NO: 17962 - DNA, 18 bp, synthetic construct
  misc_feature 1..18: note = Artificial sequence related to HLA knockouts in cell therapy
  source 1..18: mol_type = other DNA
tgacctgtgctccctccc

SEQ ID NO: 17963 - DNA, 18 bp, synthetic construct
  misc_feature 1..18: note = Artificial sequence related to HLA knockouts in cell therapy
  source 1..18: mol_type = other DNA
gacctgtgctccctcccc

SEQ ID NO: 17964 - DNA, 18 bp, synthetic construct
  misc_feature 1..18: note = Artificial sequence related to HLA knockouts in cell therapy
  source 1..18: mol_type = other DNA
acctgtgctccctcccca

SEQ ID NO: 17965 - DNA, 18 bp, synthetic construct
  misc_feature 1..18: note = Artificial sequence related to HLA knockouts in cell therapy
  source 1..18: mol_type = other DNA
cctgtgctccctccccaa

SEQ ID NO: 17966 - DNA, 18 bp, synthetic construct
  misc_feature 1..18: note = Artificial sequence related to HLA knockouts in cell therapy
  source 1..18: mol_type = other DNA
ctgtgctccctccccaat

SEQ ID NO: 17967 - DNA, 18 bp, synthetic construct
  misc_feature 1..18: note = Artificial sequence related to HLA knockouts in cell therapy
  source 1..18: mol_type = other DNA
tgtgctccctccccaatc

SEQ ID NO: 17968 - DNA, 18 bp, synthetic construct
  misc_feature 1..18: note = Artificial sequence related to HLA knockouts in cell therapy
  source 1..18: mol_type = other DNA
gtgctccctccccaatca

SEQ ID NO: 17969 - DNA, 18 bp, synthetic construct
  misc_feature 1..18: note = Artificial sequence related to HLA knockouts in cell therapy
  source 1..18: mol_type = other DNA
gctccctccccaatcatc

SEQ ID NO: 17970 - DNA, 18 bp, synthetic construct
  misc_feature 1..18: note = Artificial sequence related to HLA knockouts in cell therapy
  source 1..18: mol_type = other DNA
cctgttccagagaggtgg

SEQ ID NO: 17971 - DNA, 18 bp, synthetic construct
  misc_feature 1..18: note = Artificial sequence related to HLA knockouts in cell therapy
  source 1..18: mol_type = other DNA
ctgttccagagaggtggg

SEQ ID NO: 17972 - DNA, 18 bp, synthetic construct
  misc_feature 1..18: note = Artificial sequence related to HLA knockouts in cell therapy
  source 1..18: mol_type = other DNA
tgttccagagaggtgggg

SEQ ID NO: 17973 - DNA, 18 bp, synthetic construct
  misc_feature 1..18: note = Artificial sequence related to HLA knockouts in cell therapy
  source 1..18: mol_type = other DNA
gttccagagaggtggggc

SEQ ID NO: 17974 - DNA, 18 bp, synthetic construct
  misc_feature 1..18: note = Artificial sequence related to HLA knockouts in cell therapy
  source 1..18: mol_type = other DNA
ttccagagaggtggggct

SEQ ID NO: 17975 - DNA, 18 bp, synthetic construct
  misc_feature 1..18: note = Artificial sequence related to HLA knockouts in cell therapy
  source 1..18: mol_type = other DNA
tccagagaggtggggctg

SEQ ID NO: 17976 - DNA, 18 bp, synthetic construct
  misc_feature 1..18: note = Artificial sequence related to HLA knockouts in cell therapy
  source 1..18: mol_type = other DNA
ccagagaggtggggctga

SEQ ID NO: 17977 - DNA, 18 bp, synthetic construct
  misc_feature 1..18: note = Artificial sequence related to HLA knockouts in cell therapy
  source 1..18: mol_type = other DNA
cagagaggtggggctgag

SEQ ID NO: 17978 - DNA, 18 bp, synthetic construct
  misc_feature 1..18: note = Artificial sequence related to HLA knockouts in cell therapy
  source 1..18: mol_type = other DNA
agagaggtggggctgagg

SEQ ID NO: 17979 - DNA, 18 bp, synthetic construct
  misc_feature 1..18: note = Artificial sequence related to HLA knockouts in cell therapy
  source 1..18: mol_type = other DNA
gagaggtggggctgaggt

SEQ ID NO: 17980 - DNA, 18 bp, synthetic construct
  misc_feature 1..18: note = Artificial sequence related to HLA knockouts in cell therapy
  source 1..18: mol_type = other DNA
agaggtggggctgaggtg

SEQ ID NO: 17981 - DNA, 18 bp, synthetic construct
  misc_feature 1..18: note = Artificial sequence related to HLA knockouts in cell therapy
  source 1..18: mol_type = other DNA
gaggtggggctgaggtgt

SEQ ID NO: 17982 - DNA, 18 bp, synthetic construct
  misc_feature 1..18: note = Artificial sequence related to HLA knockouts in cell therapy
  source 1..18: mol_type = other DNA
aggtggggctgaggtgtc

SEQ ID NO: 17983 - DNA, 18 bp, synthetic construct
  misc_feature 1..18: note = Artificial sequence related to HLA knockouts in cell therapy
  source 1..18: mol_type = other DNA
ggtggggctgaggtgtct

SEQ ID NO: 17984 - DNA, 18 bp, synthetic construct
  misc_feature 1..18: note = Artificial sequence related to HLA knockouts in cell therapy
  source 1..18: mol_type = other DNA
gtggggctgaggtgtctc

SEQ ID NO: 17985 - DNA, 18 bp, synthetic construct
  misc_feature 1..18: note = Artificial sequence related to HLA knockouts in cell therapy
  source 1..18: mol_type = other DNA
tggggctgaggtgtctcc

SEQ ID NO: 17986 - DNA, 18 bp, synthetic construct
  misc_feature 1..18: note = Artificial sequence related to HLA knockouts in cell therapy
  source 1..18: mol_type = other DNA
ggggctgaggtgtctcca

SEQ ID NO: 17987 - DNA, 18 bp, synthetic construct
  misc_feature 1..18: note = Artificial sequence related to HLA knockouts in cell therapy
  source 1..18: mol_type = other DNA
gggctgaggtgtctccat

SEQ ID NO: 17988 - DNA, 18 bp, synthetic construct
  misc_feature 1..18: note = Artificial sequence related to HLA knockouts in cell therapy
  source 1..18: mol_type = other DNA
ggctgaggtgtctccatc

SEQ ID NO: 17989 - DNA, 19 bp, synthetic construct
  misc_feature 1..19: note = Artificial sequence related to HLA knockouts in cell therapy
  source 1..19: mol_type = other DNA
cagaagcagaggggtcagg

SEQ ID NO: 17990 - DNA, 19 bp, synthetic construct
  misc_feature 1..19: note = Artificial sequence related to HLA knockouts in cell therapy
  source 1..19: mol_type = other DNA
agaagcagaggggtcaggg

SEQ ID NO: 17991 - DNA, 19 bp, synthetic construct
  misc_feature 1..19: note = Artificial sequence related to HLA knockouts in cell therapy
  source 1..19: mol_type = other DNA
gaagcagaggggtcagggc

SEQ ID NO: 17992 - DNA, 19 bp, synthetic construct
  misc_feature 1..19: note = Artificial sequence related to HLA knockouts in cell therapy
  source 1..19: mol_type = other DNA
aagcagaggggtcagggcg

SEQ ID NO: 17993 - DNA, 19 bp, synthetic construct
  misc_feature 1..19: note = Artificial sequence related to HLA knockouts in cell therapy
  source 1..19: mol_type = other DNA
agcagaggggtcagggcga

SEQ ID NO: 17994 - DNA, 19 bp, synthetic construct
  misc_feature 1..19: note = Artificial sequence related to HLA knockouts in cell therapy
  source 1..19: mol_type = other DNA
gcagaggggtcagggcgaa

SEQ ID NO: 17995 - DNA, 19 bp, synthetic construct
  misc_feature 1..19: note = Artificial sequence related to HLA knockouts in cell therapy
  source 1..19: mol_type = other DNA
cagaggggtcagggcgaag

SEQ ID NO: 17996 - DNA, 19 bp, synthetic construct
  misc_feature 1..19: note = Artificial sequence related to HLA knockouts in cell therapy
  source 1..19: mol_type = other DNA
agaggggtcagggcgaagt

SEQ ID NO: 17997 - DNA, 19 bp, synthetic construct
  misc_feature 1..19: note = Artificial sequence related to HLA knockouts in cell therapy
  source 1..19: mol_type = other DNA
gaggggtcagggcgaagtc

SEQ ID NO: 17998 - DNA, 19 bp, synthetic construct
  misc_feature 1..19: note = Artificial sequence related to HLA knockouts in cell therapy
  source 1..19: mol_type = other DNA
aggggtcagggcgaagtcc

SEQ ID NO: 17999 - DNA, 19 bp, synthetic construct
  misc_feature 1..19: note = Artificial sequence related to HLA knockouts in cell therapy
  source 1..19: mol_type = other DNA
ggggtcagggcgaagtccc

SEQ ID NO: 18000 - DNA, 19 bp, synthetic construct
  misc_feature 1..19: note = Artificial sequence related to HLA knockouts in cell therapy
  source 1..19: mol_type = other DNA
gggtcagggcgaagtccca

SEQ ID NO: 18001 - DNA, 19 bp, synthetic construct
  misc_feature 1..19: note = Artificial sequence related to HLA knockouts in cell therapy
  source 1..19: mol_type = other DNA
ggtcagggcgaagtcccag

SEQ ID NO: 18002 - DNA, 19 bp, synthetic construct
  misc_feature 1..19: note = Artificial sequence related to HLA knockouts in cell therapy
  source 1..19: mol_type = other DNA
gtcagggcgaagtcccagg

SEQ ID NO: 18003 - DNA, 19 bp, synthetic construct
  misc_feature 1..19: note = Artificial sequence related to HLA knockouts in cell therapy
  source 1..19: mol_type = other DNA
tcagggcgaagtcccaggg

SEQ ID NO: 18004 - DNA, 19 bp, synthetic construct
  misc_feature 1..19: note = Artificial sequence related to HLA knockouts in cell therapy
  source 1..19: mol_type = other DNA
cagggcgaagtcccagggc

SEQ ID NO: 18005 - DNA, 19 bp, synthetic construct
  misc_feature 1..19: note = Artificial sequence related to HLA knockouts in cell therapy
  source 1..19: mol_type = other DNA
agggcgaagtcccagggcc

SEQ ID NO: 18006 - DNA, 19 bp, synthetic construct
  misc_feature 1..19: note = Artificial sequence related to HLA knockouts in cell therapy
  source 1..19: mol_type = other DNA
gggcgaagtcccagggccc

SEQ ID NO: 18007 - DNA, 19 bp, synthetic construct
  misc_feature 1..19: note = Artificial sequence related to HLA knockouts in cell therapy
  source 1..19: mol_type = other DNA
ggcgaagtcccagggcccc

SEQ ID NO: 18008 - DNA, 19 bp, synthetic construct
  misc_feature 1..19: note = Artificial sequence related to HLA knockouts in cell therapy
  source 1..19: mol_type = other DNA
gcgaagtcccagggcccca

SEQ ID NO: 18009 - DNA, 19 bp, synthetic construct
  misc_feature 1..19: note = Artificial sequence related to HLA knockouts in cell therapy
  source 1..19: mol_type = other DNA
cgaagtcccagggccccag

SEQ ID NO: 18010 - DNA, 19 bp, synthetic construct
  misc_feature 1..19: note = Artificial sequence related to HLA knockouts in cell therapy
  source 1..19: mol_type = other DNA
gaagtcccagggccccagg

SEQ ID NO: 18011 - DNA, 19 bp, synthetic construct
  misc_feature 1..19: note = Artificial sequence related to HLA knockouts in cell therapy
  source 1..19: mol_type = other DNA
aagtcccagggccccaggc

SEQ ID NO: 18012 - DNA, 19 bp, synthetic construct
  misc_feature 1..19: note = Artificial sequence related to HLA knockouts in cell therapy
  source 1..19: mol_type = other DNA
agtcccagggccccaggcg

SEQ ID NO: 18013 - DNA, 19 bp, synthetic construct
  misc_feature 1..19: note = Artificial sequence related to HLA knockouts in cell therapy
  source 1..19: mol_type = other DNA
gtcccagggccccaggcgt

SEQ ID NO: 18014 - DNA, 19 bp, synthetic construct
  misc_feature 1..19: note = Artificial sequence related to HLA knockouts in cell therapy
  source 1..19: mol_type = other DNA
tcccagggccccaggcgtg

SEQ ID NO: 18015 - DNA, 19 bp, synthetic construct
  misc_feature 1..19: note = Artificial sequence related to HLA knockouts in cell therapy
  source 1..19: mol_type = other DNA
cccagggccccaggcgtgg

SEQ ID NO: 18016 - DNA, 19 bp, synthetic construct
  misc_feature 1..19: note = Artificial sequence related to HLA knockouts in cell therapy
  source 1..19: mol_type = other DNA
ccagggccccaggcgtggc

SEQ ID NO: 18017 - DNA, 19 bp, synthetic construct
  misc_feature 1..19: note = Artificial sequence related to HLA knockouts in cell therapy
  source 1..19: mol_type = other DNA
cagggccccaggcgtggct

SEQ ID NO: 18018 - DNA, 19 bp, synthetic construct
  misc_feature 1..19: note = Artificial sequence related to HLA knockouts in cell therapy
  source 1..19: mol_type = other DNA
agggccccaggcgtggctc

SEQ ID NO: 18019 - DNA, 19 bp, synthetic construct
  misc_feature 1..19: note = Artificial sequence related to HLA knockouts in cell therapy
  source 1..19: mol_type = other DNA
gggccccaggcgtggctct

SEQ ID NO: 18020 - DNA, 19 bp, synthetic construct
  misc_feature 1..19: note = Artificial sequence related to HLA knockouts in cell therapy
  source 1..19: mol_type = other DNA
ggccccaggcgtggctctc

SEQ ID NO: 18021 - DNA, 19 bp, synthetic construct
  misc_feature 1..19: note = Artificial sequence related to HLA knockouts in cell therapy
  source 1..19: mol_type = other DNA
gccccaggcgtggctctca

SEQ ID NO: 18022 - DNA, 19 bp, synthetic construct
  misc_feature 1..19: note = Artificial sequence related to HLA knockouts in cell therapy
  source 1..19: mol_type = other DNA
ccccaggcgtggctctcag

SEQ ID NO: 18023 - DNA, 19 bp, synthetic construct
  misc_feature 1..19: note = Artificial sequence related to HLA knockouts in cell therapy
  source 1..19: mol_type = other DNA
cccaggcgtggctctcagg

SEQ ID NO: 18024 - DNA, 19 bp, synthetic construct
  misc_feature 1..19: note = Artificial sequence related to HLA knockouts in cell therapy
  source 1..19: mol_type = other DNA
ccaggcgtggctctcaggg

SEQ ID NO: 18025 - DNA, 19 bp, synthetic construct
  misc_feature 1..19: note = Artificial sequence related to HLA knockouts in cell therapy
  source 1..19: mol_type = other DNA
caggcgtggctctcagggt

SEQ ID NO: 18026 - DNA, 19 bp, synthetic construct
  misc_feature 1..19: note = Artificial sequence related to HLA knockouts in cell therapy
  source 1..19: mol_type = other DNA
aggcgtggctctcagggtc

SEQ ID NO: 18027 - DNA, 19 bp, synthetic construct
  misc_feature 1..19: note = Artificial sequence related to HLA knockouts in cell therapy
  source 1..19: mol_type = other DNA
ggcgtggctctcagggtct

SEQ ID NO: 18028 - DNA, 19 bp, synthetic construct
  misc_feature 1..19: note = Artificial sequence related to HLA knockouts in cell therapy
  source 1..19: mol_type = other DNA
gcgtggctctcagggtctc

SEQ ID NO: 18029 - DNA, 19 bp, synthetic construct
  misc_feature 1..19: note = Artificial sequence related to HLA knockouts in cell therapy
  source 1..19: mol_type = other DNA
cgtggctctcagggtctca

SEQ ID NO: 18030 - DNA, 19 bp, synthetic construct
  misc_feature 1..19: note = Artificial sequence related to HLA knockouts in cell therapy
  source 1..19: mol_type = other DNA
gtggctctcagggtctcag

SEQ ID NO: 18031 - DNA, 19 bp, synthetic construct
  misc_feature 1..19: note = Artificial sequence related to HLA knockouts in cell therapy
  source 1..19: mol_type = other DNA
tggctctcagggtctcagg

SEQ ID NO: 18032 - DNA, 19 bp, synthetic construct
  misc_feature 1..19: note = Artificial sequence related to HLA knockouts in cell therapy
  source 1..19: mol_type = other DNA
ggctctcagggtctcaggc

SEQ ID NO: 18033 - DNA, 19 bp, synthetic construct
  misc_feature 1..19: note = Artificial sequence related to HLA knockouts in cell therapy
  source 1..19: mol_type = other DNA
gctctcagggtctcaggcc

SEQ ID NO: 18034 - DNA, 19 bp, synthetic construct
  misc_feature 1..19: note = Artificial sequence related to HLA knockouts in cell therapy
  source 1..19: mol_type = other DNA
ctctcagggtctcaggccc

SEQ ID NO: 18035 - DNA, 19 bp, synthetic construct
  misc_feature 1..19: note = Artificial sequence related to HLA knockouts in cell therapy
  source 1..19: mol_type = other DNA
tctcagggtctcaggcccc

SEQ ID NO: 18036 - DNA, 19 bp, synthetic construct
  misc_feature 1..19: note = Artificial sequence related to HLA knockouts in cell therapy
  source 1..19: mol_type = other DNA
ctcagggtctcaggccccg

SEQ ID NO: 18037 - DNA, 19 bp, synthetic construct
  misc_feature 1..19: note = Artificial sequence related to HLA knockouts in cell therapy
  source 1..19: mol_type = other DNA
tcagggtctcaggccccga

SEQ ID NO: 18038 - DNA, 19 bp, synthetic construct
  misc_feature 1..19: note = Artificial sequence related to HLA knockouts in cell therapy
  source 1..19: mol_type = other DNA
cagggtctcaggccccgaa

SEQ ID NO: 18039 - DNA, 19 bp, synthetic construct
  misc_feature 1..19: note = Artificial sequence related to HLA knockouts in cell therapy
  source 1..19: mol_type = other DNA
agggtctcaggccccgaag

SEQ ID NO: 18040 - DNA, 19 bp, synthetic construct
  misc_feature 1..19: note = Artificial sequence related to HLA knockouts in cell therapy
  source 1..19: mol_type = other DNA
gggtctcaggccccgaagg

SEQ ID NO: 18041 - DNA, 19 bp, synthetic construct
  misc_feature 1..19: note = Artificial sequence related to HLA knockouts in cell therapy
  source 1..19: mol_type = other DNA
ggtctcaggccccgaaggc

SEQ ID NO: 18042 - DNA, 19 bp, synthetic construct
  misc_feature 1..19: note = Artificial sequence related to HLA knockouts in cell therapy
  source 1..19: mol_type = other DNA
gtctcaggccccgaaggcg

SEQ ID NO: 18043 - DNA, 19 bp, synthetic construct
  misc_feature 1..19: note = Artificial sequence related to HLA knockouts in cell therapy
  source 1..19: mol_type = other DNA
tctcaggccccgaaggcgg

SEQ ID NO: 18044 - DNA, 19 bp, synthetic construct
  misc_feature 1..19: note = Artificial sequence related to HLA knockouts in cell therapy
  source 1..19: mol_type = other DNA
ctcaggccccgaaggcggt

SEQ ID NO: 18045 - DNA, 19 bp, synthetic construct
  misc_feature 1..19: note = Artificial sequence related to HLA knockouts in cell therapy
  source 1..19: mol_type = other DNA
tcaggccccgaaggcggtg

SEQ ID NO: 18046 - DNA, 19 bp, synthetic construct
  misc_feature 1..19: note = Artificial sequence related to HLA knockouts in cell therapy
  source 1..19: mol_type = other DNA
caggccccgaaggcggtgt

SEQ ID NO: 18047 - DNA, 19 bp, synthetic construct
  misc_feature 1..19: note = Artificial sequence related to HLA knockouts in cell therapy
  source 1..19: mol_type = other DNA
aggccccgaaggcggtgta

SEQ ID NO: 18048 - DNA, 19 bp, synthetic construct
  misc_feature 1..19: note = Artificial sequence related to HLA knockouts in cell therapy
  source 1..19: mol_type = other DNA
ggccccgaaggcggtgtat

SEQ ID NO: 18049 - DNA, 19 bp, synthetic construct
  misc_feature 1..19: note = Artificial sequence related to HLA knockouts in cell therapy
  source 1..19: mol_type = other DNA
gccccgaaggcggtgtatg

SEQ ID NO: 18050 - DNA, 19 bp, synthetic construct
  misc_feature 1..19: note = Artificial sequence related to HLA knockouts in cell therapy
  source 1..19: mol_type = other DNA
ccccgaaggcggtgtatgg

SEQ ID NO: 18051 - DNA, 19 bp, synthetic construct
  misc_feature 1..19: note = Artificial sequence related to HLA knockouts in cell therapy
  source 1..19: mol_type = other DNA
cccgaaggcggtgtatgga

SEQ ID NO: 18052 - DNA, 19 bp, synthetic construct
  misc_feature 1..19: note = Artificial sequence related to HLA knockouts in cell therapy
  source 1..19: mol_type = other DNA
ggcggtgtatggattgggg

SEQ ID NO: 18053 - DNA, 19 bp, synthetic construct
  misc_feature 1..19: note = Artificial sequence related to HLA knockouts in cell therapy
  source 1..19: mol_type = other DNA
tggattggggagtcccagc

SEQ ID NO: 18054 - DNA, 19 bp, synthetic construct
  misc_feature 1..19: note = Artificial sequence related to HLA knockouts in cell therapy
  source 1..19: mol_type = other DNA
ggattggggagtcccagcc

SEQ ID NO: 18055 - DNA, 19 bp, synthetic construct
  misc_feature 1..19: note = Artificial sequence related to HLA knockouts in cell therapy
  source 1..19: mol_type = other DNA
gattggggagtcccagcct

SEQ ID NO: 18056 - DNA, 19 bp, synthetic construct
  misc_feature 1..19: note = Artificial sequence related to HLA knockouts in cell therapy
  source 1..19: mol_type = other DNA
ttggggagtcccagccttg

SEQ ID NO: 18057 - DNA, 19 bp, synthetic construct
  misc_feature 1..19: note = Artificial sequence related to HLA knockouts in cell therapy
  source 1..19: mol_type = other DNA
tggggagtcccagccttgg

SEQ ID NO: 18058 - DNA, 19 bp, synthetic construct
  misc_feature 1..19: note = Artificial sequence related to HLA knockouts in cell therapy
  source 1..19: mol_type = other DNA
ggggagtcccagccttggg

SEQ ID NO: 18059 - DNA, 19 bp, synthetic construct
  misc_feature 1..19: note = Artificial sequence related to HLA knockouts in cell therapy
  source 1..19: mol_type = other DNA
gggagtcccagccttgggg

SEQ ID NO: 18060 - DNA, 19 bp, synthetic construct
  misc_feature 1..19: note = Artificial sequence related to HLA knockouts in cell therapy
  source 1..19: mol_type = other DNA
ggagtcccagccttgggga

SEQ ID NO: 18061 - DNA, 19 bp, synthetic construct
  misc_feature 1..19: note = Artificial sequence related to HLA knockouts in cell therapy
  source 1..19: mol_type = other DNA
gagtcccagccttggggat

SEQ ID NO: 18062 - DNA, 19 bp, synthetic construct
  misc_feature 1..19: note = Artificial sequence related to HLA knockouts in cell therapy
  source 1..19: mol_type = other DNA
gtcccagccttggggattc

SEQ ID NO: 18063 - DNA, 19 bp, synthetic construct
  misc_feature 1..19: note = Artificial sequence related to HLA knockouts in cell therapy
  source 1..19: mol_type = other DNA
tcccagccttggggattcc

SEQ ID NO: 18064 - DNA, 19 bp, synthetic construct
  misc_feature 1..19: note = Artificial sequence related to HLA knockouts in cell therapy
  source 1..19: mol_type = other DNA
cccagccttggggattccc

SEQ ID NO: 18065 - DNA, 19 bp, synthetic construct
  misc_feature 1..19: note = Artificial sequence related to HLA knockouts in cell therapy
  source 1..19: mol_type = other DNA
ccagccttggggattcccc

SEQ ID NO: 18066 - DNA, 19 bp, synthetic construct
  misc_feature 1..19: note = Artificial sequence related to HLA knockouts in cell therapy
  source 1..19: mol_type = other DNA
cagccttggggattcccca

SEQ ID NO: 18067 - DNA, 19 bp, synthetic construct
  misc_feature 1..19: note = Artificial sequence related to HLA knockouts in cell therapy
  source 1..19: mol_type = other DNA
gccttggggattccccaac

SEQ ID NO: 18068 - DNA, 19 bp, synthetic construct
  misc_feature 1..19: note = Artificial sequence related to HLA knockouts in cell therapy
  source 1..19: mol_type = other DNA
tggggattccccaactccg

SEQ ID NO: 18069 - DNA, 19 bp, synthetic construct
  misc_feature 1..19: note = Artificial sequence related to HLA knockouts in cell therapy
  source 1..19: mol_type = other DNA
ggggattccccaactccgc

SEQ ID NO: 18070 - DNA, 19 bp, synthetic construct
  misc_feature 1..19: note = Artificial sequence related to HLA knockouts in cell therapy
  source 1..19: mol_type = other DNA
gggattccccaactccgca

SEQ ID NO: 18071 - DNA, 19 bp, synthetic construct
  misc_feature 1..19: note = Artificial sequence related to HLA knockouts in cell therapy
  source 1..19: mol_type = other DNA
ggattccccaactccgcag

SEQ ID NO: 18072 - DNA, 19 bp, synthetic construct
  misc_feature 1..19: note = Artificial sequence related to HLA knockouts in cell therapy
  source 1..19: mol_type = other DNA
cctggatactcacgacgcg

SEQ ID NO: 18073 - DNA, 19 bp, synthetic construct
  misc_feature 1..19: note = Artificial sequence related to HLA knockouts in cell therapy
  source 1..19: mol_type = other DNA
ctggatactcacgacgcgg

SEQ ID NO: 18074 - DNA, 19 bp, synthetic construct
  misc_feature 1..19: note = Artificial sequence related to HLA knockouts in cell therapy
  source 1..19: mol_type = other DNA
ggatactcacgacgcggac

SEQ ID NO: 18075 - DNA, 19 bp, synthetic construct
  misc_feature 1..19: note = Artificial sequence related to HLA knockouts in cell therapy
  source 1..19: mol_type = other DNA
gatactcacgacgcggacc

SEQ ID NO: 18076 - DNA, 19 bp, synthetic construct
  misc_feature 1..19: note = Artificial sequence related to HLA knockouts in cell therapy
  source 1..19: mol_type = other DNA
atactcacgacgcggaccc

SEQ ID NO: 18077 - DNA, 19 bp, synthetic construct
  misc_feature 1..19: note = Artificial sequence related to HLA knockouts in cell therapy
  source 1..19: mol_type = other DNA
tactcacgacgcggaccca

SEQ ID NO: 18078 - DNA, 19 bp, synthetic construct
  misc_feature 1..19: note = Artificial sequence related to HLA knockouts in cell therapy
  source 1..19: mol_type = other DNA
actcacgacgcggacccag

SEQ ID NO: 18079 - DNA, 19 bp, synthetic construct
  misc_feature 1..19: note = Artificial sequence related to HLA knockouts in cell therapy
  source 1..19: mol_type = other DNA
ctcacgacgcggacccagt

SEQ ID NO: 18080 - DNA, 19 bp, synthetic construct
  misc_feature 1..19: note = Artificial sequence related to HLA knockouts in cell therapy
  source 1..19: mol_type = other DNA
tcacgacgcggacccagtt

SEQ ID NO: 18081 - DNA, 19 bp, synthetic construct
  misc_feature 1..19: note = Artificial sequence related to HLA knockouts in cell therapy
  source 1..19: mol_type = other DNA
cacgacgcggacccagttc

SEQ ID NO: 18082 - DNA, 19 bp, synthetic construct
  misc_feature 1..19: note = Artificial sequence related to HLA knockouts in cell therapy
  source 1..19: mol_type = other DNA
acgacgcggacccagttct

SEQ ID NO: 18083 - DNA, 19 bp, synthetic construct
  misc_feature 1..19: note = Artificial sequence related to HLA knockouts in cell therapy
  source 1..19: mol_type = other DNA
cgacgcggacccagttctc

SEQ ID NO: 18084 - DNA, 19 bp, synthetic construct
  misc_feature 1..19: note = Artificial sequence related to HLA knockouts in cell therapy
  source 1..19: mol_type = other DNA
gacgcggacccagttctca

SEQ ID NO: 18085 - DNA, 19 bp, synthetic construct
  misc_feature 1..19: note = Artificial sequence related to HLA knockouts in cell therapy
  source 1..19: mol_type = other DNA
acgcggacccagttctcac

SEQ ID NO: 18086 - DNA, 19 bp, synthetic construct
  misc_feature 1..19: note = Artificial sequence related to HLA knockouts in cell therapy
  source 1..19: mol_type = other DNA
cgcggacccagttctcact

SEQ ID NO: 18087 - DNA, 19 bp, synthetic construct
  misc_feature 1..19: note = Artificial sequence related to HLA knockouts in cell therapy
  source 1..19: mol_type = other DNA
gcggacccagttctcactc

SEQ ID NO: 18088 - DNA, 19 bp, synthetic construct
  misc_feature 1..19: note = Artificial sequence related to HLA knockouts in cell therapy
  source 1..19: mol_type = other DNA
cggacccagttctcactcc

SEQ ID NO: 18089 - DNA, 19 bp, synthetic construct
  misc_feature 1..19: note = Artificial sequence related to HLA knockouts in cell therapy
  source 1..19: mol_type = other DNA
ggacccagttctcactccc

SEQ ID NO: 18090 - DNA, 19 bp, synthetic construct
  misc_feature 1..19: note = Artificial sequence related to HLA knockouts in cell therapy
  source 1..19: mol_type = other DNA
cactcccattgggtgtcgg

SEQ ID NO: 18091 - DNA, 19 bp, synthetic construct
  misc_feature 1..19: note = Artificial sequence related to HLA knockouts in cell therapy
  source 1..19: mol_type = other DNA
actcccattgggtgtcggg

SEQ ID NO: 18092 - DNA, 19 bp, synthetic construct
  misc_feature 1..19: note = Artificial sequence related to HLA knockouts in cell therapy
  source 1..19: mol_type = other DNA
ctcccattgggtgtcgggt

SEQ ID NO: 18093 - DNA, 19 bp, synthetic construct
  misc_feature 1..19: note = Artificial sequence related to HLA knockouts in cell therapy
  source 1..19: mol_type = other DNA
gggtgtcgggtttccagag

SEQ ID NO: 18094 - DNA, 19 bp, synthetic construct
  misc_feature 1..19: note = Artificial sequence related to HLA knockouts in cell therapy
  source 1..19: mol_type = other DNA
ccaatcagtgtcgtcgcgg

SEQ ID NO: 18095 - DNA, 19 bp, synthetic construct
  misc_feature 1..19: note = Artificial sequence related to HLA knockouts in cell therapy
  source 1..19: mol_type = other DNA
atcagtgtcgtcgcggtcg

SEQ ID NO: 18096 - DNA, 19 bp, synthetic construct
  misc_feature 1..19: note = Artificial sequence related to HLA knockouts in cell therapy
  source 1..19: mol_type = other DNA
tcagtgtcgtcgcggtcgc

SEQ ID NO: 18097 - DNA, 19 bp, synthetic construct
  misc_feature 1..19: note = Artificial sequence related to HLA knockouts in cell therapy
  source 1..19: mol_type = other DNA
cagtgtcgtcgcggtcgcg

SEQ ID NO: 18098 - DNA, 19 bp, synthetic construct
  misc_feature 1..19: note = Artificial sequence related to HLA knockouts in cell therapy
  source 1..19: mol_type = other DNA
agtgtcgtcgcggtcgcgg

SEQ ID NO: 18099 - DNA, 19 bp, synthetic construct
  misc_feature 1..19: note = Artificial sequence related to HLA knockouts in cell therapy
  source 1..19: mol_type = other DNA
gtgtcgtcgcggtcgcggt

SEQ ID NO: 18100 - DNA, 19 bp, synthetic construct
  misc_feature 1..19: note = Artificial sequence related to HLA knockouts in cell therapy
  source 1..19: mol_type = other DNA
tgtcgtcgcggtcgcggtt

SEQ ID NO: 18101 - DNA, 19 bp, synthetic construct
  misc_feature 1..19: note = Artificial sequence related to HLA knockouts in cell therapy
  source 1..19: mol_type = other DNA
gtcgtcgcggtcgcggttc

SEQ ID NO: 18102 - DNA, 19 bp, synthetic construct
  misc_feature 1..19: note = Artificial sequence related to HLA knockouts in cell therapy
  source 1..19: mol_type = other DNA
tcgtcgcggtcgcggttct

SEQ ID NO: 18103 - DNA, 19 bp, synthetic construct
  misc_feature 1..19: note = Artificial sequence related to HLA knockouts in cell therapy
  source 1..19: mol_type = other DNA
cgtcgcggtcgcggttcta

SEQ ID NO: 18104 - DNA, 19 bp, synthetic construct
  misc_feature 1..19: note = Artificial sequence related to HLA knockouts in cell therapy
  source 1..19: mol_type = other DNA
gtcgcggtcgcggttctaa

SEQ ID NO: 18105 - DNA, 19 bp, synthetic construct
  misc_feature 1..19: note = Artificial sequence related to HLA knockouts in cell therapy
  source 1..19: mol_type = other DNA
cgcggtcgcggttctaaag

SEQ ID NO: 18106 - DNA, 19 bp, synthetic construct
  misc_feature 1..19: note = Artificial sequence related to HLA knockouts in cell therapy
  source 1..19: mol_type = other DNA
ctaaagtccgcacgcaccc

SEQ ID NO: 18107 - DNA, 19 bp, synthetic construct
  misc_feature 1..19: note = Artificial sequence related to HLA knockouts in cell therapy
  source 1..19: mol_type = other DNA
aaagtccgcacgcacccac

SEQ ID NO: 18108 - DNA, 19 bp, synthetic construct
  misc_feature 1..19: note = Artificial sequence related to HLA knockouts in cell therapy
  source 1..19: mol_type = other DNA
aagtccgcacgcacccacc

SEQ ID NO: 18109 - DNA, 19 bp, synthetic construct
  misc_feature 1..19: note = Artificial sequence related to HLA knockouts in cell therapy
  source 1..19: mol_type = other DNA
agtccgcacgcacccaccg

SEQ ID NO: 18110 - DNA, 19 bp, synthetic construct
  misc_feature 1..19: note = Artificial sequence related to HLA knockouts in cell therapy
  source 1..19: mol_type = other DNA
gtccgcacgcacccaccgg

SEQ ID NO: 18111 - DNA, 19 bp, synthetic construct
  misc_feature 1..19: note = Artificial sequence related to HLA knockouts in cell therapy
  source 1..19: mol_type = other DNA
tccgcacgcacccaccggg

SEQ ID NO: 18112 - DNA, 19 bp, synthetic construct
  misc_feature 1..19: note = Artificial sequence related to HLA knockouts in cell therapy
  source 1..19: mol_type = other DNA
ccgcacgcacccaccggga

SEQ ID NO: 18113 - DNA, 19 bp, synthetic construct
  misc_feature 1..19: note = Artificial sequence related to HLA knockouts in cell therapy
  source 1..19: mol_type = other DNA
cgcacgcacccaccgggac

SEQ ID NO: 18114 - DNA, 19 bp, synthetic construct
  misc_feature 1..19: note = Artificial sequence related to HLA knockouts in cell therapy
  source 1..19: mol_type = other DNA
gcacgcacccaccgggact

SEQ ID NO: 18115 - DNA, 19 bp, synthetic construct
  misc_feature 1..19: note = Artificial sequence related to HLA knockouts in cell therapy
  source 1..19: mol_type = other DNA
cacgcacccaccgggactc

SEQ ID NO: 18116 - DNA, 19 bp, synthetic construct
  misc_feature 1..19: note = Artificial sequence related to HLA knockouts in cell therapy
  source 1..19: mol_type = other DNA
acgcacccaccgggactca

SEQ ID NO: 18117 - DNA, 19 bp, synthetic construct
  misc_feature 1..19: note = Artificial sequence related to HLA knockouts in cell therapy
  source 1..19: mol_type = other DNA
cgcacccaccgggactcag

SEQ ID NO: 18118 - DNA, 19 bp, synthetic construct
  misc_feature 1..19: note = Artificial sequence related to HLA knockouts in cell therapy
  source 1..19: mol_type = other DNA
gcacccaccgggactcaga

SEQ ID NO: 18119 - DNA, 19 bp, synthetic construct
  misc_feature 1..19: note = Artificial sequence related to HLA knockouts in cell therapy
  source 1..19: mol_type = other DNA
cacccaccgggactcagat

SEQ ID NO: 18120 - DNA, 19 bp, synthetic construct
  misc_feature 1..19: note = Artificial sequence related to HLA knockouts in cell therapy
  source 1..19: mol_type = other DNA
cccaccgggactcagattc

SEQ ID NO: 18121 - DNA, 19 bp, synthetic construct
  misc_feature 1..19: note = Artificial sequence related to HLA knockouts in cell therapy
  source 1..19: mol_type = other DNA
ccgggactcagattctccc

SEQ ID NO: 18122 - DNA, 19 bp, synthetic construct
  misc_feature 1..19: note = Artificial sequence related to HLA knockouts in cell therapy
  source 1..19: mol_type = other DNA
cgggactcagattctcccc

SEQ ID NO: 18123 - DNA, 19 bp, synthetic construct
  misc_feature 1..19: note = Artificial sequence related to HLA knockouts in cell therapy
  source 1..19: mol_type = other DNA
cagattctccccagacgcc

SEQ ID NO: 18124 - DNA, 19 bp, synthetic construct
  misc_feature 1..19: note = Artificial sequence related to HLA knockouts in cell therapy
  source 1..19: mol_type = other DNA
agattctccccagacgccg

SEQ ID NO: 18125 - DNA, 19 bp, synthetic construct
  misc_feature 1..19: note = Artificial sequence related to HLA knockouts in cell therapy
  source 1..19: mol_type = other DNA
gattctccccagacgccga

SEQ ID NO: 18126 - DNA, 19 bp, synthetic construct
  misc_feature 1..19: note = Artificial sequence related to HLA knockouts in cell therapy
  source 1..19: mol_type = other DNA
attctccccagacgccgag

SEQ ID NO: 18127 - DNA, 19 bp, synthetic construct
  misc_feature 1..19: note = Artificial sequence related to HLA knockouts in cell therapy
  source 1..19: mol_type = other DNA
ttctccccagacgccgagg

SEQ ID NO: 18128 - DNA, 19 bp, synthetic construct
  misc_feature 1..19: note = Artificial sequence related to HLA knockouts in cell therapy
  source 1..19: mol_type = other DNA
tctccccagacgccgagga

SEQ ID NO: 18129 - DNA, 19 bp, synthetic construct
  misc_feature 1..19: note = Artificial sequence related to HLA knockouts in cell therapy
  source 1..19: mol_type = other DNA
ctccccagacgccgaggat

SEQ ID NO: 18130 - DNA, 19 bp, synthetic construct
  misc_feature 1..19: note = Artificial sequence related to HLA knockouts in cell therapy
  source 1..19: mol_type = other DNA
tccccagacgccgaggatg

SEQ ID NO: 18131 - DNA, 19 bp, synthetic construct
  misc_feature 1..19: note = Artificial sequence related to HLA knockouts in cell therapy
  source 1..19: mol_type = other DNA
ccccagacgccgaggatgg

SEQ ID NO: 18132 - DNA, 19 bp, synthetic construct
  misc_feature 1..19: note = Artificial sequence related to HLA knockouts in cell therapy
  source 1..19: mol_type = other DNA
cccagacgccgaggatggc

SEQ ID NO: 18133 - DNA, 19 bp, synthetic construct
  misc_feature 1..19: note = Artificial sequence related to HLA knockouts in cell therapy
  source 1..19: mol_type = other DNA
ccagacgccgaggatggcc

SEQ ID NO: 18134 - DNA, 19 bp, synthetic construct
  misc_feature 1..19: note = Artificial sequence related to HLA knockouts in cell therapy
  source 1..19: mol_type = other DNA
cagacgccgaggatggccg

SEQ ID NO: 18135 - DNA, 19 bp, synthetic construct
  misc_feature 1..19: note = Artificial sequence related to HLA knockouts in cell therapy
  source 1..19: mol_type = other DNA
agacgccgaggatggccgt

SEQ ID NO: 18136 - DNA, 19 bp, synthetic construct
  misc_feature 1..19: note = Artificial sequence related to HLA knockouts in cell therapy
  source 1..19: mol_type = other DNA
gacgccgaggatggccgtc

SEQ ID NO: 18137 - DNA, 19 bp, synthetic construct
  misc_feature 1..19: note = Artificial sequence related to HLA knockouts in cell therapy
  source 1..19: mol_type = other DNA
acgccgaggatggccgtca

SEQ ID NO: 18138 - DNA, 19 bp, synthetic construct
  misc_feature 1..19: note = Artificial sequence related to HLA knockouts in cell therapy
  source 1..19: mol_type = other DNA
cgccgaggatggccgtcat

SEQ ID NO: 18139 - DNA, 19 bp, synthetic construct
  misc_feature 1..19: note = Artificial sequence related to HLA knockouts in cell therapy
  source 1..19: mol_type = other DNA
gccgaggatggccgtcatg

SEQ ID NO: 18140 - DNA, 19 bp, synthetic construct
  misc_feature 1..19: note = Artificial sequence related to HLA knockouts in cell therapy
  source 1..19: mol_type = other DNA
ccgaggatggccgtcatgg

SEQ ID NO: 18141 - DNA, 19 bp, synthetic construct
  misc_feature 1..19: note = Artificial sequence related to HLA knockouts in cell therapy
  source 1..19: mol_type = other DNA
cgaggatggccgtcatggc

SEQ ID NO: 18142 - DNA, 19 bp, synthetic construct
  misc_feature 1..19: note = Artificial sequence related to HLA knockouts in cell therapy
  source 1..19: mol_type = other DNA
gaggatggccgtcatggcg

SEQ ID NO: 18143 - DNA, 19 bp, synthetic construct
  misc_feature 1..19: note = Artificial sequence related to HLA knockouts in cell therapy
  source 1..19: mol_type = other DNA
aggatggccgtcatggcgc

SEQ ID NO: 18144 - DNA, 19 bp, synthetic construct
  misc_feature 1..19: note = Artificial sequence related to HLA knockouts in cell therapy
  source 1..19: mol_type = other DNA
ggatggccgtcatggcgcc

SEQ ID NO: 18145 - DNA, 19 bp, synthetic construct
  misc_feature 1..19: note = Artificial sequence related to HLA knockouts in cell therapy
  source 1..19: mol_type = other DNA
gatggccgtcatggcgccc

SEQ ID NO: 18146 - DNA, 19 bp, synthetic construct
  misc_feature 1..19: note = Artificial sequence related to HLA knockouts in cell therapy
  source 1..19: mol_type = other DNA
atggccgtcatggcgcccc

SEQ ID NO: 18147 - DNA, 19 bp, synthetic construct
  misc_feature 1..19: note = Artificial sequence related to HLA knockouts in cell therapy
  source 1..19: mol_type = other DNA
tggccgtcatggcgccccg

SEQ ID NO: 18148 - DNA, 19 bp, synthetic construct
  misc_feature 1..19: note = Artificial sequence related to HLA knockouts in cell therapy
  source 1..19: mol_type = other DNA
ggccgtcatggcgccccga

SEQ ID NO: 18149 - DNA, 19 bp, synthetic construct
  misc_feature 1..19: note = Artificial sequence related to HLA knockouts in cell therapy
  source 1..19: mol_type = other DNA
gccgtcatggcgccccgaa

SEQ ID NO: 18150 - DNA, 19 bp, synthetic construct
  misc_feature 1..19: note = Artificial sequence related to HLA knockouts in cell therapy
  source 1..19: mol_type = other DNA
ccgtcatggcgccccgaac

SEQ ID NO: 18151 - DNA, 19 bp, synthetic construct
  misc_feature 1..19: note = Artificial sequence related to HLA knockouts in cell therapy
  source 1..19: mol_type = other DNA
cgtcatggcgccccgaacc

SEQ ID NO: 18152 - DNA, 19 bp, synthetic construct
  misc_feature 1..19: note = Artificial sequence related to HLA knockouts in cell therapy
  source 1..19: mol_type = other DNA
gtcatggcgccccgaaccc

SEQ ID NO: 18153 - DNA, 19 bp, synthetic construct
  misc_feature 1..19: note = Artificial sequence related to HLA knockouts in cell therapy
  source 1..19: mol_type = other DNA
tcatggcgccccgaaccct

SEQ ID NO: 18154 - DNA, 19 bp, synthetic construct
  misc_feature 1..19: note = Artificial sequence related to HLA knockouts in cell therapy
  source 1..19: mol_type = other DNA
catggcgccccgaaccctc

SEQ ID NO: 18155 - DNA, 19 bp, synthetic construct
  misc_feature 1..19: note = Artificial sequence related to HLA knockouts in cell therapy
  source 1..19: mol_type = other DNA
atggcgccccgaaccctcg

SEQ ID NO: 18156 - DNA, 19 bp, synthetic construct
  misc_feature 1..19: note = Artificial sequence related to HLA knockouts in cell therapy
  source 1..19: mol_type = other DNA
tggcgccccgaaccctcgt

SEQ ID NO: 18157 - DNA, 19 bp, synthetic construct
  misc_feature 1..19: note = Artificial sequence related to HLA knockouts in cell therapy
  source 1..19: mol_type = other DNA
ggcgccccgaaccctcgtc

SEQ ID NO: 18158 - DNA, 19 bp, synthetic construct
  misc_feature 1..19: note = Artificial sequence related to HLA knockouts in cell therapy
  source 1..19: mol_type = other DNA
gcgccccgaaccctcgtcc

SEQ ID NO: 18159 - DNA, 19 bp, synthetic construct
  misc_feature 1..19: note = Artificial sequence related to HLA knockouts in cell therapy
  source 1..19: mol_type = other DNA
cgccccgaaccctcgtcct

SEQ ID NO: 18160 - DNA, 19 bp, synthetic construct
  misc_feature 1..19: note = Artificial sequence related to HLA knockouts in cell therapy
  source 1..19: mol_type = other DNA
gccccgaaccctcgtcctg

SEQ ID NO: 18161 - DNA, 19 bp, synthetic construct
  misc_feature 1..19: note = Artificial sequence related to HLA knockouts in cell therapy
  source 1..19: mol_type = other DNA
ccccgaaccctcgtcctgc

SEQ ID NO: 18162 - DNA, 19 bp, synthetic construct
  misc_feature 1..19: note = Artificial sequence related to HLA knockouts in cell therapy
  source 1..19: mol_type = other DNA
cccgaaccctcgtcctgct

SEQ ID NO: 18163 - DNA, 19 bp, synthetic construct
  misc_feature 1..19: note = Artificial sequence related to HLA knockouts in cell therapy
  source 1..19: mol_type = other DNA
ccgaaccctcgtcctgcta

SEQ ID NO: 18164 - DNA, 19 bp, synthetic construct
  misc_feature 1..19: note = Artificial sequence related to HLA knockouts in cell therapy
  source 1..19: mol_type = other DNA
cgaaccctcgtcctgctac

SEQ ID NO: 18165 - DNA, 19 bp, synthetic construct
  misc_feature 1..19: note = Artificial sequence related to HLA knockouts in cell therapy
  source 1..19: mol_type = other DNA
ccctcgtcctgctactctc

SEQ ID NO: 18166 - DNA, 19 bp, synthetic construct
  misc_feature 1..19: note = Artificial sequence related to HLA knockouts in cell therapy
  source 1..19: mol_type = other DNA
cctcgtcctgctactctcg

SEQ ID NO: 18167 - DNA, 19 bp, synthetic construct
  misc_feature 1..19: note = Artificial sequence related to HLA knockouts in cell therapy
  source 1..19: mol_type = other DNA
ctcgtcctgctactctcgg

SEQ ID NO: 18168 - DNA, 19 bp, synthetic construct
  misc_feature 1..19: note = Artificial sequence related to HLA knockouts in cell therapy
  source 1..19: mol_type = other DNA
tcgtcctgctactctcggg

SEQ ID NO: 18169 - DNA, 19 bp, synthetic construct
  misc_feature 1..19: note = Artificial sequence related to HLA knockouts in cell therapy
  source 1..19: mol_type = other DNA
cgtcctgctactctcgggg

SEQ ID NO: 18170 - DNA, 19 bp, synthetic construct
  misc_feature 1..19: note = Artificial sequence related to HLA knockouts in cell therapy
  source 1..19: mol_type = other DNA
gtcctgctactctcggggg

SEQ ID NO: 18171 - DNA, 19 bp, synthetic construct
  misc_feature 1..19: note = Artificial sequence related to HLA knockouts in cell therapy
  source 1..19: mol_type = other DNA
tcctgctactctcgggggc

SEQ ID NO: 18172 - DNA, 19 bp, synthetic construct
  misc_feature 1..19: note = Artificial sequence related to HLA knockouts in cell therapy
  source 1..19: mol_type = other DNA
cctgctactctcgggggct

SEQ ID NO: 18173 - DNA, 19 bp, synthetic construct
  misc_feature 1..19: note = Artificial sequence related to HLA knockouts in cell therapy
  source 1..19: mol_type = other DNA
ctgctactctcgggggctc

SEQ ID NO: 18174 - DNA, 19 bp, synthetic construct
  misc_feature 1..19: note = Artificial sequence related to HLA knockouts in cell therapy
  source 1..19: mol_type = other DNA
tgctactctcgggggctct

SEQ ID NO: 18175 - DNA, 19 bp, synthetic construct
  misc_feature 1..19: note = Artificial sequence related to HLA knockouts in cell therapy
  source 1..19: mol_type = other DNA
gctactctcgggggctctg

SEQ ID NO: 18176 - DNA, 19 bp, synthetic construct
  misc_feature 1..19: note = Artificial sequence related to HLA knockouts in cell therapy
  source 1..19: mol_type = other DNA
ctactctcgggggctctgg

SEQ ID NO: 18177 - DNA, 19 bp, synthetic construct
  misc_feature 1..19: note = Artificial sequence related to HLA knockouts in cell therapy
  source 1..19: mol_type = other DNA
tactctcgggggctctggc

SEQ ID NO: 18178 - DNA, 19 bp, synthetic construct
  misc_feature 1..19: note = Artificial sequence related to HLA knockouts in cell therapy
  source 1..19: mol_type = other DNA
actctcgggggctctggcc

SEQ ID NO: 18179 - DNA, 19 bp, synthetic construct
  misc_feature 1..19: note = Artificial sequence related to HLA knockouts in cell therapy
  source 1..19: mol_type = other DNA
ctctcgggggctctggccc

SEQ ID NO: 18180 - DNA, 19 bp, synthetic construct
  misc_feature 1..19: note = Artificial sequence related to HLA knockouts in cell therapy
  source 1..19: mol_type = other DNA
tctcgggggctctggccct

SEQ ID NO: 18181 - DNA, 19 bp, synthetic construct
  misc_feature 1..19: note = Artificial sequence related to HLA knockouts in cell therapy
  source 1..19: mol_type = other DNA
ctcgggggctctggccctg

SEQ ID NO: 18182 - DNA, 19 bp, synthetic construct
  misc_feature 1..19: note = Artificial sequence related to HLA knockouts in cell therapy
  source 1..19: mol_type = other DNA
tcgggggctctggccctga

SEQ ID NO: 18183 - DNA, 19 bp, synthetic construct
  misc_feature 1..19: note = Artificial sequence related to HLA knockouts in cell therapy
  source 1..19: mol_type = other DNA
cgggggctctggccctgac

SEQ ID NO: 18184 - DNA, 19 bp, synthetic construct
  misc_feature 1..19: note = Artificial sequence related to HLA knockouts in cell therapy
  source 1..19: mol_type = other DNA
gggggctctggccctgacc

SEQ ID NO: 18185 - DNA, 19 bp, synthetic construct
  misc_feature 1..19: note = Artificial sequence related to HLA knockouts in cell therapy
  source 1..19: mol_type = other DNA
ggggctctggccctgaccc

SEQ ID NO: 18186 - DNA, 19 bp, synthetic construct
  misc_feature 1..19: note = Artificial sequence related to HLA knockouts in cell therapy
  source 1..19: mol_type = other DNA
gggctctggccctgaccca

SEQ ID NO: 18187 - DNA, 19 bp, synthetic construct
  misc_feature 1..19: note = Artificial sequence related to HLA knockouts in cell therapy
  source 1..19: mol_type = other DNA
ggctctggccctgacccag

SEQ ID NO: 18188 - DNA, 19 bp, synthetic construct
  misc_feature 1..19: note = Artificial sequence related to HLA knockouts in cell therapy
  source 1..19: mol_type = other DNA
gctctggccctgacccaga

SEQ ID NO: 18189 - DNA, 19 bp, synthetic construct
  misc_feature 1..19: note = Artificial sequence related to HLA knockouts in cell therapy
  source 1..19: mol_type = other DNA
ctctggccctgacccagac

SEQ ID NO: 18190 - DNA, 19 bp, synthetic construct
  misc_feature 1..19: note = Artificial sequence related to HLA knockouts in cell therapy
  source 1..19: mol_type = other DNA
tctggccctgacccagacc

SEQ ID NO: 18191 - DNA, 19 bp, synthetic construct
  misc_feature 1..19: note = Artificial sequence related to HLA knockouts in cell therapy
  source 1..19: mol_type = other DNA
ctggccctgacccagacct

SEQ ID NO: 18192 - DNA, 19 bp, synthetic construct
  misc_feature 1..19: note = Artificial sequence related to HLA knockouts in cell therapy
  source 1..19: mol_type = other DNA
tggccctgacccagacctg

SEQ ID NO: 18193 - DNA, 19 bp, synthetic construct
  misc_feature 1..19: note = Artificial sequence related to HLA knockouts in cell therapy
  source 1..19: mol_type = other DNA
ggccctgacccagacctgg

SEQ ID NO: 18194 - DNA, 19 bp, synthetic construct
  misc_feature 1..19: note = Artificial sequence related to HLA knockouts in cell therapy
  source 1..19: mol_type = other DNA
gccctgacccagacctggg

SEQ ID NO: 18195 - DNA, 19 bp, synthetic construct
  misc_feature 1..19: note = Artificial sequence related to HLA knockouts in cell therapy
  source 1..19: mol_type = other DNA
ccctgacccagacctgggc

SEQ ID NO: 18196 - DNA, 19 bp, synthetic construct
  misc_feature 1..19: note = Artificial sequence related to HLA knockouts in cell therapy
  source 1..19: mol_type = other DNA
cctgacccagacctgggcg

SEQ ID NO: 18197 - DNA, 19 bp, synthetic construct
  misc_feature 1..19: note = Artificial sequence related to HLA knockouts in cell therapy
  source 1..19: mol_type = other DNA
ctgacccagacctgggcgg

SEQ ID NO: 18198 - DNA, 19 bp, synthetic construct
  misc_feature 1..19: note = Artificial sequence related to HLA knockouts in cell therapy
  source 1..19: mol_type = other DNA
tgacccagacctgggcggg

SEQ ID NO: 18199 - DNA, 19 bp, synthetic construct
  misc_feature 1..19: note = Artificial sequence related to HLA knockouts in cell therapy
  source 1..19: mol_type = other DNA
gacccagacctgggcgggc

SEQ ID NO: 18200 - DNA, 19 bp, synthetic construct
  misc_feature 1..19: note = Artificial sequence related to HLA knockouts in cell therapy
  source 1..19: mol_type = other DNA
acccagacctgggcgggct

SEQ ID NO: 18201 - DNA, 19 bp, synthetic construct
  misc_feature 1..19: note = Artificial sequence related to HLA knockouts in cell therapy
  source 1..19: mol_type = other DNA
cccagacctgggcgggctc

SEQ ID NO: 18202 - DNA, 19 bp, synthetic construct
  misc_feature 1..19: note = Artificial sequence related to HLA knockouts in cell therapy
  source 1..19: mol_type = other DNA
ccagacctgggcgggctct

SEQ ID NO: 18203 - DNA, 19 bp, synthetic construct
  misc_feature 1..19: note = Artificial sequence related to HLA knockouts in cell therapy
  source 1..19: mol_type = other DNA
cagacctgggcgggctctc

SEQ ID NO: 18204 - DNA, 19 bp, synthetic construct
  misc_feature 1..19: note = Artificial sequence related to HLA knockouts in cell therapy
  source 1..19: mol_type = other DNA
agacctgggcgggctctca

SEQ ID NO: 18205 - DNA, 19 bp, synthetic construct
  misc_feature 1..19: note = Artificial sequence related to HLA knockouts in cell therapy
  source 1..19: mol_type = other DNA
gacctgggcgggctctcac

SEQ ID NO: 18206 - DNA, 19 bp, synthetic construct
  misc_feature 1..19: note = Artificial sequence related to HLA knockouts in cell therapy
  source 1..19: mol_type = other DNA
acctgggcgggctctcact

SEQ ID NO: 18207 - DNA, 19 bp, synthetic construct
  misc_feature 1..19: note = Artificial sequence related to HLA knockouts in cell therapy
  source 1..19: mol_type = other DNA
cctgggcgggctctcactc

SEQ ID NO: 18208 - DNA, 19 bp, synthetic construct
  misc_feature 1..19: note = Artificial sequence related to HLA knockouts in cell therapy
  source 1..19: mol_type = other DNA
ctgggcgggctctcactcc

SEQ ID NO: 18209 - DNA, 19 bp, synthetic construct
  misc_feature 1..19: note = Artificial sequence related to HLA knockouts in cell therapy
  source 1..19: mol_type = other DNA
tgggcgggctctcactcca

SEQ ID NO: 18210 - DNA, 19 bp, synthetic construct
  misc_feature 1..19: note = Artificial sequence related to HLA knockouts in cell therapy
  source 1..19: mol_type = other DNA
gggcgggctctcactccat

SEQ ID NO: 18211 - DNA, 19 bp, synthetic construct
  misc_feature 1..19: note = Artificial sequence related to HLA knockouts in cell therapy
  source 1..19: mol_type = other DNA
ggcgggctctcactccatg

SEQ ID NO: 18212 - DNA, 19 bp, synthetic construct
  misc_feature 1..19: note = Artificial sequence related to HLA knockouts in cell therapy
  source 1..19: mol_type = other DNA
gcgggctctcactccatga

SEQ ID NO: 18213 - DNA, 19 bp, synthetic construct
  misc_feature 1..19: note = Artificial sequence related to HLA knockouts in cell therapy
  source 1..19: mol_type = other DNA
cgggctctcactccatgag

SEQ ID NO: 18214 - DNA, 19 bp, synthetic construct
  misc_feature 1..19: note = Artificial sequence related to HLA knockouts in cell therapy
  source 1..19: mol_type = other DNA
gggctctcactccatgagg

SEQ ID NO: 18215 - DNA, 19 bp, synthetic construct
  misc_feature 1..19: note = Artificial sequence related to HLA knockouts in cell therapy
  source 1..19: mol_type = other DNA
cttcacatccgtgtcccgg

SEQ ID NO: 18216 - DNA, 19 bp, synthetic construct
  misc_feature 1..19: note = Artificial sequence related to HLA knockouts in cell therapy
  source 1..19: mol_type = other DNA
ttcacatccgtgtcccggc

SEQ ID NO: 18217 - DNA, 19 bp, synthetic construct
  misc_feature 1..19: note = Artificial sequence related to HLA knockouts in cell therapy
  source 1..19: mol_type = other DNA
tcacatccgtgtcccggcc

SEQ ID NO: 18218 - DNA, 19 bp, synthetic construct
  misc_feature 1..19: note = Artificial sequence related to HLA knockouts in cell therapy
  source 1..19: mol_type = other DNA
cacatccgtgtcccggccc

SEQ ID NO: 18219 - DNA, 19 bp, synthetic construct
  misc_feature 1..19: note = Artificial sequence related to HLA knockouts in cell therapy
  source 1..19: mol_type = other DNA
acatccgtgtcccggcccg

SEQ ID NO: 18220 - DNA, 19 bp, synthetic construct
  misc_feature 1..19: note = Artificial sequence related to HLA knockouts in cell therapy
  source 1..19: mol_type = other DNA
catccgtgtcccggcccgg

SEQ ID NO: 18221 - DNA, 19 bp, synthetic construct
  misc_feature 1..19: note = Artificial sequence related to HLA knockouts in cell therapy
  source 1..19: mol_type = other DNA
atccgtgtcccggcccggc

SEQ ID NO: 18222 - DNA, 19 bp, synthetic construct
  misc_feature 1..19: note = Artificial sequence related to HLA knockouts in cell therapy
  source 1..19: mol_type = other DNA
tccgtgtcccggcccggcc

SEQ ID NO: 18223 - DNA, 19 bp, synthetic construct
  misc_feature 1..19: note = Artificial sequence related to HLA knockouts in cell therapy
  source 1..19: mol_type = other DNA
ccgtgtcccggcccggccg

SEQ ID NO: 18224 - DNA, 19 bp, synthetic construct
  misc_feature 1..19: note = Artificial sequence related to HLA knockouts in cell therapy
  source 1..19: mol_type = other DNA
cgtgtcccggcccggccgc

SEQ ID NO: 18225 - DNA, 19 bp, synthetic construct
  misc_feature 1..19: note = Artificial sequence related to HLA knockouts in cell therapy
  source 1..19: mol_type = other DNA
gtgtcccggcccggccgcg

SEQ ID NO: 18226 - DNA, 19 bp, synthetic construct
  misc_feature 1..19: note = Artificial sequence related to HLA knockouts in cell therapy
  source 1..19: mol_type = other DNA
tgtcccggcccggccgcgg

SEQ ID NO: 18227 - DNA, 19 bp, synthetic construct
  misc_feature 1..19: note = Artificial sequence related to HLA knockouts in cell therapy
  source 1..19: mol_type = other DNA
gtcccggcccggccgcggg

SEQ ID NO: 18228 - DNA, 19 bp, synthetic construct
  misc_feature 1..19: note = Artificial sequence related to HLA knockouts in cell therapy
  source 1..19: mol_type = other DNA
tcccggcccggccgcgggg

SEQ ID NO: 18229 - DNA, 19 bp, synthetic construct
  misc_feature 1..19: note = Artificial sequence related to HLA knockouts in cell therapy
  source 1..19: mol_type = other DNA
cccggcccggccgcgggga

SEQ ID NO: 18230 - DNA, 19 bp, synthetic construct
  misc_feature 1..19: note = Artificial sequence related to HLA knockouts in cell therapy
  source 1..19: mol_type = other DNA
ccggcccggccgcggggag

SEQ ID NO: 18231 - DNA, 19 bp, synthetic construct
  misc_feature 1..19: note = Artificial sequence related to HLA knockouts in cell therapy
  source 1..19: mol_type = other DNA
cggcccggccgcggggagc

SEQ ID NO: 18232 - DNA, 19 bp, synthetic construct
  misc_feature 1..19: note = Artificial sequence related to HLA knockouts in cell therapy
  source 1..19: mol_type = other DNA
ggcccggccgcggggagcc

SEQ ID NO: 18233 - DNA, 19 bp, synthetic construct
  misc_feature 1..19: note = Artificial sequence related to HLA knockouts in cell therapy
  source 1..19: mol_type = other DNA
gcccggccgcggggagccc

SEQ ID NO: 18234 - DNA, 19 bp, synthetic construct
  misc_feature 1..19: note = Artificial sequence related to HLA knockouts in cell therapy
  source 1..19: mol_type = other DNA
cccggccgcggggagcccc

SEQ ID NO: 18235 - DNA, 19 bp, synthetic construct
  misc_feature 1..19: note = Artificial sequence related to HLA knockouts in cell therapy
  source 1..19: mol_type = other DNA
ccggccgcggggagccccg

SEQ ID NO: 18236 - DNA, 19 bp, synthetic construct
  misc_feature 1..19: note = Artificial sequence related to HLA knockouts in cell therapy
  source 1..19: mol_type = other DNA
cggccgcggggagccccgc

SEQ ID NO: 18237 - DNA, 19 bp, synthetic construct
  misc_feature 1..19: note = Artificial sequence related to HLA knockouts in cell therapy
  source 1..19: mol_type = other DNA
ggccgcggggagccccgct

SEQ ID NO: 18238 - DNA, 19 bp, synthetic construct
  misc_feature 1..19: note = Artificial sequence related to HLA knockouts in cell therapy
  source 1..19: mol_type = other DNA
gccgcggggagccccgctt

SEQ ID NO: 18239 - DNA, 19 bp, synthetic construct
  misc_feature 1..19: note = Artificial sequence related to HLA knockouts in cell therapy
  source 1..19: mol_type = other DNA
ccgcggggagccccgcttc

SEQ ID NO: 18240 - DNA, 19 bp, synthetic construct
  misc_feature 1..19: note = Artificial sequence related to HLA knockouts in cell therapy
  source 1..19: mol_type = other DNA
cgcggggagccccgcttca

SEQ ID NO: 18241 - DNA, 19 bp, synthetic construct
  misc_feature 1..19: note = Artificial sequence related to HLA knockouts in cell therapy
  source 1..19: mol_type = other DNA
gcggggagccccgcttcat

SEQ ID NO: 18242 - DNA, 19 bp, synthetic construct
  misc_feature 1..19: note = Artificial sequence related to HLA knockouts in cell therapy
  source 1..19: mol_type = other DNA
cggggagccccgcttcatc

SEQ ID NO: 18243 - DNA, 19 bp, synthetic construct
  misc_feature 1..19: note = Artificial sequence related to HLA knockouts in cell therapy
  source 1..19: mol_type = other DNA
ggggagccccgcttcatcg

SEQ ID NO: 18244 - DNA, 19 bp, synthetic construct
  misc_feature 1..19: note = Artificial sequence related to HLA knockouts in cell therapy
  source 1..19: mol_type = other DNA
gggagccccgcttcatcgc

SEQ ID NO: 18245 - DNA, 19 bp, synthetic construct
  misc_feature 1..19: note = Artificial sequence related to HLA knockouts in cell therapy
  source 1..19: mol_type = other DNA
ggagccccgcttcatcgca

SEQ ID NO: 18246 - DNA, 19 bp, synthetic construct
  misc_feature 1..19: note = Artificial sequence related to HLA knockouts in cell therapy
  source 1..19: mol_type = other DNA
gagccccgcttcatcgcag

SEQ ID NO: 18247 - DNA, 19 bp, synthetic construct
  misc_feature 1..19: note = Artificial sequence related to HLA knockouts in cell therapy
  source 1..19: mol_type = other DNA
agccccgcttcatcgcagt

SEQ ID NO: 18248 - DNA, 19 bp, synthetic construct
  misc_feature 1..19: note = Artificial sequence related to HLA knockouts in cell therapy
  source 1..19: mol_type = other DNA
gccccgcttcatcgcagtg

SEQ ID NO: 18249 - DNA, 19 bp, synthetic construct
  misc_feature 1..19: note = Artificial sequence related to HLA knockouts in cell therapy
  source 1..19: mol_type = other DNA
ccccgcttcatcgcagtgg

SEQ ID NO: 18250 - DNA, 19 bp, synthetic construct
  misc_feature 1..19: note = Artificial sequence related to HLA knockouts in cell therapy
  source 1..19: mol_type = other DNA
cccgcttcatcgcagtggg

SEQ ID NO: 18251 - DNA, 19 bp, synthetic construct
  misc_feature 1..19: note = Artificial sequence related to HLA knockouts in cell therapy
  source 1..19: mol_type = other DNA
ccgcttcatcgcagtgggc

SEQ ID NO: 18252 - DNA, 19 bp, synthetic construct
  misc_feature 1..19: note = Artificial sequence related to HLA knockouts in cell therapy
  source 1..19: mol_type = other DNA
cgcttcatcgcagtgggct

SEQ ID NO: 18253 - DNA, 19 bp, synthetic construct
  misc_feature 1..19: note = Artificial sequence related to HLA knockouts in cell therapy
  source 1..19: mol_type = other DNA
catcgcagtgggctacgtg

SEQ ID NO: 18254 - DNA, 19 bp, synthetic construct
  misc_feature 1..19: note = Artificial sequence related to HLA knockouts in cell therapy
  source 1..19: mol_type = other DNA
atcgcagtgggctacgtgg

SEQ ID NO: 18255 - DNA, 19 bp, synthetic construct
  misc_feature 1..19: note = Artificial sequence related to HLA knockouts in cell therapy
  source 1..19: mol_type = other DNA
tcgcagtgggctacgtgga

SEQ ID NO: 18256 - DNA, 19 bp, synthetic construct
  misc_feature 1..19: note = Artificial sequence related to HLA knockouts in cell therapy
  source 1..19: mol_type = other DNA
cgcagtgggctacgtggac

SEQ ID NO: 18257 - DNA, 19 bp, synthetic construct
  misc_feature 1..19: note = Artificial sequence related to HLA knockouts in cell therapy
  source 1..19: mol_type = other DNA
gcagtgggctacgtggacg

SEQ ID NO: 18258 - DNA, 19 bp, synthetic construct
  misc_feature 1..19: note = Artificial sequence related to HLA knockouts in cell therapy
  source 1..19: mol_type = other DNA
cagtgggctacgtggacga

SEQ ID NO: 18259 - DNA, 19 bp, synthetic construct
  misc_feature 1..19: note = Artificial sequence related to HLA knockouts in cell therapy
  source 1..19: mol_type = other DNA
agtgggctacgtggacgac

SEQ ID NO: 18260 - DNA, 19 bp, synthetic construct
  misc_feature 1..19: note = Artificial sequence related to HLA knockouts in cell therapy
  source 1..19: mol_type = other DNA
gtgggctacgtggacgaca

SEQ ID NO: 18261 - DNA, 19 bp, synthetic construct
  misc_feature 1..19: note = Artificial sequence related to HLA knockouts in cell therapy
  source 1..19: mol_type = other DNA
tgggctacgtggacgacac

SEQ ID NO: 18262 - DNA, 19 bp, synthetic construct
  misc_feature 1..19: note = Artificial sequence related to HLA knockouts in cell therapy
  source 1..19: mol_type = other DNA
gggctacgtggacgacacg

SEQ ID NO: 18263 - DNA, 19 bp, synthetic construct
  misc_feature 1..19: note = Artificial sequence related to HLA knockouts in cell therapy
  source 1..19: mol_type = other DNA
ggctacgtggacgacacgc

SEQ ID NO: 18264 - DNA, 19 bp, synthetic construct
  misc_feature 1..19: note = Artificial sequence related to HLA knockouts in cell therapy
  source 1..19: mol_type = other DNA
gctacgtggacgacacgca

SEQ ID NO: 18265 - DNA, 19 bp, synthetic construct
  misc_feature 1..19: note = Artificial sequence related to HLA knockouts in cell therapy
  source 1..19: mol_type = other DNA
ctacgtggacgacacgcag

SEQ ID NO: 18266 - DNA, 19 bp, synthetic construct
  misc_feature 1..19: note = Artificial sequence related to HLA knockouts in cell therapy
  source 1..19: mol_type = other DNA
cgtggacgacacgcagttc

SEQ ID NO: 18267 - DNA, 19 bp, synthetic construct
  misc_feature 1..19: note = Artificial sequence related to HLA knockouts in cell therapy
  source 1..19: mol_type = other DNA
gtggacgacacgcagttcg

SEQ ID NO: 18268 - DNA, 19 bp, synthetic construct
  misc_feature 1..19: note = Artificial sequence related to HLA knockouts in cell therapy
  source 1..19: mol_type = other DNA
ggacgacacgcagttcgtg

SEQ ID NO: 18269 - DNA, 19 bp, synthetic construct
  misc_feature 1..19: note = Artificial sequence related to HLA knockouts in cell therapy
  source 1..19: mol_type = other DNA
gacgacacgcagttcgtgc

SEQ ID NO: 18270 - DNA, 19 bp, synthetic construct
  misc_feature 1..19: note = Artificial sequence related to HLA knockouts in cell therapy
  source 1..19: mol_type = other DNA
acgacacgcagttcgtgcg

SEQ ID NO: 18271 - DNA, 19 bp, synthetic construct
  misc_feature 1..19: note = Artificial sequence related to HLA knockouts in cell therapy
  source 1..19: mol_type = other DNA
cgacacgcagttcgtgcgg

SEQ ID NO: 18272 - DNA, 19 bp, synthetic construct
  misc_feature 1..19: note = Artificial sequence related to HLA knockouts in cell therapy
  source 1..19: mol_type = other DNA
gacacgcagttcgtgcggt

SEQ ID NO: 18273 - DNA, 19 bp, synthetic construct
  misc_feature 1..19: note = Artificial sequence related to HLA knockouts in cell therapy
  source 1..19: mol_type = other DNA
cacgcagttcgtgcggttc

SEQ ID NO: 18274 - DNA, 19 bp, synthetic construct
  misc_feature 1..19: note = Artificial sequence related to HLA knockouts in cell therapy
  source 1..19: mol_type = other DNA
acgcagttcgtgcggttcg

SEQ ID NO: 18275 - DNA, 19 bp, synthetic construct
  misc_feature 1..19: note = Artificial sequence related to HLA knockouts in cell therapy
  source 1..19: mol_type = other DNA
cgcagttcgtgcggttcga

SEQ ID NO: 18276 - DNA, 19 bp, synthetic construct
  misc_feature 1..19: note = Artificial sequence related to HLA knockouts in cell therapy
  source 1..19: mol_type = other DNA
gcagttcgtgcggttcgac

SEQ ID NO: 18277 - DNA, 19 bp, synthetic construct
  misc_feature 1..19: note = Artificial sequence related to HLA knockouts in cell therapy
  source 1..19: mol_type = other DNA
gttcgtgcggttcgacagc

SEQ ID NO: 18278 - DNA, 19 bp, synthetic construct
  misc_feature 1..19: note = Artificial sequence related to HLA knockouts in cell therapy
  source 1..19: mol_type = other DNA
ttcgtgcggttcgacagcg

SEQ ID NO: 18279 - DNA, 19 bp, synthetic construct
  misc_feature 1..19: note = Artificial sequence related to HLA knockouts in cell therapy
  source 1..19: mol_type = other DNA
tcgtgcggttcgacagcga

SEQ ID NO: 18280 - DNA, 19 bp, synthetic construct
  misc_feature 1..19: note = Artificial sequence related to HLA knockouts in cell therapy
  source 1..19: mol_type = other DNA
cgtgcggttcgacagcgac

SEQ ID NO: 18281 - DNA, 19 bp, synthetic construct
  misc_feature 1..19: note = Artificial sequence related to HLA knockouts in cell therapy
  source 1..19: mol_type = other DNA
gtgcggttcgacagcgacg

SEQ ID NO: 18282 - DNA, 19 bp, synthetic construct
  misc_feature 1..19: note = Artificial sequence related to HLA knockouts in cell therapy
  source 1..19: mol_type = other DNA
tgcggttcgacagcgacgc

SEQ ID NO: 18283 - DNA, 19 bp, synthetic construct
  misc_feature 1..19: note = Artificial sequence related to HLA knockouts in cell therapy
  source 1..19: mol_type = other DNA
gcggttcgacagcgacgcc

SEQ ID NO: 18284 - DNA, 19 bp, synthetic construct
  misc_feature 1..19: note = Artificial sequence related to HLA knockouts in cell therapy
  source 1..19: mol_type = other DNA
cggttcgacagcgacgccg

SEQ ID NO: 18285 - DNA, 19 bp, synthetic construct
  misc_feature 1..19: note = Artificial sequence related to HLA knockouts in cell therapy
  source 1..19: mol_type = other DNA
ggttcgacagcgacgccgc

SEQ ID NO: 18286 - DNA, 19 bp, synthetic construct
  misc_feature 1..19: note = Artificial sequence related to HLA knockouts in cell therapy
  source 1..19: mol_type = other DNA
gttcgacagcgacgccgcg

SEQ ID NO: 18287 - DNA, 19 bp, synthetic construct
  misc_feature 1..19: note = Artificial sequence related to HLA knockouts in cell therapy
  source 1..19: mol_type = other DNA
ttcgacagcgacgccgcga

SEQ ID NO: 18288 - DNA, 19 bp, synthetic construct
  misc_feature 1..19: note = Artificial sequence related to HLA knockouts in cell therapy
  source 1..19: mol_type = other DNA
tcgacagcgacgccgcgag

SEQ ID NO: 18289 - DNA, 19 bp, synthetic construct
  misc_feature 1..19: note = Artificial sequence related to HLA knockouts in cell therapy
  source 1..19: mol_type = other DNA
cgacagcgacgccgcgagc

SEQ ID NO: 18290 - DNA, 19 bp, synthetic construct
  misc_feature 1..19: note = Artificial sequence related to HLA knockouts in cell therapy
  source 1..19: mol_type = other DNA
gacagcgacgccgcgagcc

SEQ ID NO: 18291 - DNA, 19 bp, synthetic construct
  misc_feature 1..19: note = Artificial sequence related to HLA knockouts in cell therapy
  source 1..19: mol_type = other DNA
acagcgacgccgcgagcca

SEQ ID NO: 18292 - DNA, 19 bp, synthetic construct
  misc_feature 1..19: note = Artificial sequence related to HLA knockouts in cell therapy
  source 1..19: mol_type = other DNA
cagcgacgccgcgagccag

SEQ ID NO: 18293 - DNA, 19 bp, synthetic construct
  misc_feature 1..19: note = Artificial sequence related to HLA knockouts in cell therapy
  source 1..19: mol_type = other DNA
agcgacgccgcgagccaga

SEQ ID NO: 18294 - DNA, 19 bp, synthetic construct
  misc_feature 1..19: note = Artificial sequence related to HLA knockouts in cell therapy
  source 1..19: mol_type = other DNA
gcgacgccgcgagccagag

SEQ ID NO: 18295 - DNA, 19 bp, synthetic construct
  misc_feature 1..19: note = Artificial sequence related to HLA knockouts in cell therapy
  source 1..19: mol_type = other DNA
cgacgccgcgagccagagg

SEQ ID NO: 18296 - DNA, 19 bp, synthetic construct
  misc_feature 1..19: note = Artificial sequence related to HLA knockouts in cell therapy
  source 1..19: mol_type = other DNA
gacgccgcgagccagagga

SEQ ID NO: 18297 - DNA, 19 bp, synthetic construct
  misc_feature 1..19: note = Artificial sequence related to HLA knockouts in cell therapy
  source 1..19: mol_type = other DNA
acgccgcgagccagaggat

SEQ ID NO: 18298 - DNA, 19 bp, synthetic construct
  misc_feature 1..19: note = Artificial sequence related to HLA knockouts in cell therapy
  source 1..19: mol_type = other DNA
cgccgcgagccagaggatg

SEQ ID NO: 18299 - DNA, 19 bp, synthetic construct
  misc_feature 1..19: note = Artificial sequence related to HLA knockouts in cell therapy
  source 1..19: mol_type = other DNA
gccgcgagccagaggatgg

SEQ ID NO: 18300 - DNA, 19 bp, synthetic construct
  misc_feature 1..19: note = Artificial sequence related to HLA knockouts in cell therapy
  source 1..19: mol_type = other DNA
ccgcgagccagaggatgga

SEQ ID NO: 18301 - DNA, 19 bp, synthetic construct
  misc_feature 1..19: note = Artificial sequence related to HLA knockouts in cell therapy
  source 1..19: mol_type = other DNA
cgcgagccagaggatggag

SEQ ID NO: 18302 - DNA, 19 bp, synthetic construct
  misc_feature 1..19: note = Artificial sequence related to HLA knockouts in cell therapy
  source 1..19: mol_type = other DNA
gcgagccagaggatggagc

SEQ ID NO: 18303 - DNA, 19 bp, synthetic construct
  misc_feature 1..19: note = Artificial sequence related to HLA knockouts in cell therapy
  source 1..19: mol_type = other DNA
cgagccagaggatggagcc

SEQ ID NO: 18304 - DNA, 19 bp, synthetic construct
  misc_feature 1..19: note = Artificial sequence related to HLA knockouts in cell therapy
  source 1..19: mol_type = other DNA
gagccagaggatggagccg

SEQ ID NO: 18305 - DNA, 19 bp, synthetic construct
  misc_feature 1..19: note = Artificial sequence related to HLA knockouts in cell therapy
  source 1..19: mol_type = other DNA
agccagaggatggagccgc

SEQ ID NO: 18306 - DNA, 19 bp, synthetic construct
  misc_feature 1..19: note = Artificial sequence related to HLA knockouts in cell therapy
  source 1..19: mol_type = other DNA
gccagaggatggagccgcg

SEQ ID NO: 18307 - DNA, 19 bp, synthetic construct
  misc_feature 1..19: note = Artificial sequence related to HLA knockouts in cell therapy
  source 1..19: mol_type = other DNA
ccagaggatggagccgcgg

SEQ ID NO: 18308 - DNA, 19 bp, synthetic construct
  misc_feature 1..19: note = Artificial sequence related to HLA knockouts in cell therapy
  source 1..19: mol_type = other DNA
cagaggatggagccgcggg

SEQ ID NO: 18309 - DNA, 19 bp, synthetic construct
  misc_feature 1..19: note = Artificial sequence related to HLA knockouts in cell therapy
  source 1..19: mol_type = other DNA
agaggatggagccgcgggc

SEQ ID NO: 18310 - DNA, 19 bp, synthetic construct
  misc_feature 1..19: note = Artificial sequence related to HLA knockouts in cell therapy
  source 1..19: mol_type = other DNA
gaggatggagccgcgggcg

SEQ ID NO: 18311 - DNA, 19 bp, synthetic construct
  misc_feature 1..19: note = Artificial sequence related to HLA knockouts in cell therapy
  source 1..19: mol_type = other DNA
aggatggagccgcgggcgc

SEQ ID NO: 18312 - DNA, 19 bp, synthetic construct
  misc_feature 1..19: note = Artificial sequence related to HLA knockouts in cell therapy
  source 1..19: mol_type = other DNA
ggatggagccgcgggcgcc

SEQ ID NO: 18313 - DNA, 19 bp, synthetic construct
  misc_feature 1..19: note = Artificial sequence related to HLA knockouts in cell therapy
  source 1..19: mol_type = other DNA
gatggagccgcgggcgccg

SEQ ID NO: 18314 - DNA, 19 bp, synthetic construct
  misc_feature 1..19: note = Artificial sequence related to HLA knockouts in cell therapy
  source 1..19: mol_type = other DNA
atggagccgcgggcgccgt

SEQ ID NO: 18315 - DNA, 19 bp, synthetic construct
  misc_feature 1..19: note = Artificial sequence related to HLA knockouts in cell therapy
  source 1..19: mol_type = other DNA
tggagccgcgggcgccgtg

SEQ ID NO: 18316 - DNA, 19 bp, synthetic construct
  misc_feature 1..19: note = Artificial sequence related to HLA knockouts in cell therapy
  source 1..19: mol_type = other DNA
ggagccgcgggcgccgtgg

SEQ ID NO: 18317 - DNA, 19 bp, synthetic construct
  misc_feature 1..19: note = Artificial sequence related to HLA knockouts in cell therapy
  source 1..19: mol_type = other DNA
gagccgcgggcgccgtgga

SEQ ID NO: 18318 - DNA, 19 bp, synthetic construct
  misc_feature 1..19: note = Artificial sequence related to HLA knockouts in cell therapy
  source 1..19: mol_type = other DNA
agccgcgggcgccgtggat

SEQ ID NO: 18319 - DNA, 19 bp, synthetic construct
  misc_feature 1..19: note = Artificial sequence related to HLA knockouts in cell therapy
  source 1..19: mol_type = other DNA
gccgcgggcgccgtggata

SEQ ID NO: 18320 - DNA, 19 bp, synthetic construct
  misc_feature 1..19: note = Artificial sequence related to HLA knockouts in cell therapy
  source 1..19: mol_type = other DNA
ccgcgggcgccgtggatag

SEQ ID NO: 18321 - DNA, 19 bp, synthetic construct
  misc_feature 1..19: note = Artificial sequence related to HLA knockouts in cell therapy
  source 1..19: mol_type = other DNA
cgcgggcgccgtggataga

SEQ ID NO: 18322 - DNA, 19 bp, synthetic construct
  misc_feature 1..19: note = Artificial sequence related to HLA knockouts in cell therapy
  source 1..19: mol_type = other DNA
gcgggcgccgtggatagag

SEQ ID NO: 18323 - DNA, 19 bp, synthetic construct
  misc_feature 1..19: note = Artificial sequence related to HLA knockouts in cell therapy
  source 1..19: mol_type = other DNA
cgggcgccgtggatagagc

SEQ ID NO: 18324 - DNA, 19 bp, synthetic construct
  misc_feature 1..19: note = Artificial sequence related to HLA knockouts in cell therapy
  source 1..19: mol_type = other DNA
gggcgccgtggatagagca

SEQ ID NO: 18325 - DNA, 19 bp, synthetic construct
  misc_feature 1..19: note = Artificial sequence related to HLA knockouts in cell therapy
  source 1..19: mol_type = other DNA
ggcgccgtggatagagcag

SEQ ID NO: 18326 - DNA, 19 bp, synthetic construct
  misc_feature 1..19: note = Artificial sequence related to HLA knockouts in cell therapy
  source 1..19: mol_type = other DNA
gcgccgtggatagagcagg

SEQ ID NO: 18327 - DNA, 19 bp, synthetic construct
  misc_feature 1..19: note = Artificial sequence related to HLA knockouts in cell therapy
  source 1..19: mol_type = other DNA
cgccgtggatagagcagga

SEQ ID NO: 18328 - DNA, 19 bp, synthetic construct
  misc_feature 1..19: note = Artificial sequence related to HLA knockouts in cell therapy
  source 1..19: mol_type = other DNA
gccgtggatagagcaggag

SEQ ID NO: 18329 - DNA, 19 bp, synthetic construct
  misc_feature 1..19: note = Artificial sequence related to HLA knockouts in cell therapy
  source 1..19: mol_type = other DNA
ccgtggatagagcaggagg

SEQ ID NO: 18330 - DNA, 19 bp, synthetic construct
  misc_feature 1..19: note = Artificial sequence related to HLA knockouts in cell therapy
  source 1..19: mol_type = other DNA
cgtggatagagcaggaggg

SEQ ID NO: 18331 - DNA, 19 bp, synthetic construct
  misc_feature 1..19: note = Artificial sequence related to HLA knockouts in cell therapy
  source 1..19: mol_type = other DNA
ggatagagcaggagggtcc

SEQ ID NO: 18332 - DNA, 19 bp, synthetic construct
  misc_feature 1..19: note = Artificial sequence related to HLA knockouts in cell therapy
  source 1..19: mol_type = other DNA
gatagagcaggagggtccg

SEQ ID NO: 18333 - DNA, 19 bp, synthetic construct
  misc_feature 1..19: note = Artificial sequence related to HLA knockouts in cell therapy
  source 1..19: mol_type = other DNA
atagagcaggagggtccgg

SEQ ID NO: 18334 - DNA, 19 bp, synthetic construct
  misc_feature 1..19: note = Artificial sequence related to HLA knockouts in cell therapy
  source 1..19: mol_type = other DNA
tagagcaggagggtccgga

SEQ ID NO: 18335 - DNA, 19 bp, synthetic construct
  misc_feature 1..19: note = Artificial sequence related to HLA knockouts in cell therapy
  source 1..19: mol_type = other DNA
agagcaggagggtccggag

SEQ ID NO: 18336 - DNA, 19 bp, synthetic construct
  misc_feature 1..19: note = Artificial sequence related to HLA knockouts in cell therapy
  source 1..19: mol_type = other DNA
gagcaggagggtccggagt

SEQ ID NO: 18337 - DNA, 19 bp, synthetic construct
  misc_feature 1..19: note = Artificial sequence related to HLA knockouts in cell therapy
  source 1..19: mol_type = other DNA
agcaggagggtccggagta

SEQ ID NO: 18338 - DNA, 19 bp, synthetic construct
  misc_feature 1..19: note = Artificial sequence related to HLA knockouts in cell therapy
  source 1..19: mol_type = other DNA
gcaggagggtccggagtat

SEQ ID NO: 18339 - DNA, 19 bp, synthetic construct
  misc_feature 1..19: note = Artificial sequence related to HLA knockouts in cell therapy
  source 1..19: mol_type = other DNA
ggagggtccggagtattgg

SEQ ID NO: 18340 - DNA, 19 bp, synthetic construct
  misc_feature 1..19: note = Artificial sequence related to HLA knockouts in cell therapy
  source 1..19: mol_type = other DNA
gagggtccggagtattggg

SEQ ID NO: 18341 - DNA, 19 bp, synthetic construct
  misc_feature 1..19: note = Artificial sequence related to HLA knockouts in cell therapy
  source 1..19: mol_type = other DNA
gggtccggagtattgggac

SEQ ID NO: 18342 - DNA, 19 bp, synthetic construct
  misc_feature 1..19: note = Artificial sequence related to HLA knockouts in cell therapy
  source 1..19: mol_type = other DNA
ggtccggagtattgggacg

SEQ ID NO: 18343 - DNA, 19 bp, synthetic construct
  misc_feature 1..19: note = Artificial sequence related to HLA knockouts in cell therapy
  source 1..19: mol_type = other DNA
gtccggagtattgggacgg

SEQ ID NO: 18344 - DNA, 19 bp, synthetic construct
  misc_feature 1..19: note = Artificial sequence related to HLA knockouts in cell therapy
  source 1..19: mol_type = other DNA
tccggagtattgggacggg

SEQ ID NO: 18345 - DNA, 19 bp, synthetic construct
  misc_feature 1..19: note = Artificial sequence related to HLA knockouts in cell therapy
  source 1..19: mol_type = other DNA
ccggagtattgggacgggg

SEQ ID NO: 18346 - DNA, 19 bp, synthetic construct
  misc_feature 1..19: note = Artificial sequence related to HLA knockouts in cell therapy
  source 1..19: mol_type = other DNA
cggagtattgggacgggga

SEQ ID NO: 18347 - DNA, 19 bp, synthetic construct
  misc_feature 1..19: note = Artificial sequence related to HLA knockouts in cell therapy
  source 1..19: mol_type = other DNA
ggagtattgggacggggag

SEQ ID NO: 18348 - DNA, 19 bp, synthetic construct
  misc_feature 1..19: note = Artificial sequence related to HLA knockouts in cell therapy
  source 1..19: mol_type = other DNA
attgggacggggagacacg

SEQ ID NO: 18349 - DNA, 19 bp, synthetic construct
  misc_feature 1..19: note = Artificial sequence related to HLA knockouts in cell therapy
  source 1..19: mol_type = other DNA
ttgggacggggagacacgg

SEQ ID NO: 18350 - DNA, 19 bp, synthetic construct
  misc_feature 1..19: note = Artificial sequence related to HLA knockouts in cell therapy
  source 1..19: mol_type = other DNA
tgggacggggagacacgga

SEQ ID NO: 18351 - DNA, 19 bp, synthetic construct
  misc_feature 1..19: note = Artificial sequence related to HLA knockouts in cell therapy
  source 1..19: mol_type = other DNA
gggacggggagacacggaa

SEQ ID NO: 18352 - DNA, 19 bp, synthetic construct
  misc_feature 1..19: note = Artificial sequence related to HLA knockouts in cell therapy
  source 1..19: mol_type = other DNA
ggacggggagacacggaaa

SEQ ID NO: 18353 - DNA, 19 bp, synthetic construct
  misc_feature 1..19: note = Artificial sequence related to HLA knockouts in cell therapy
  source 1..19: mol_type = other DNA
gacggggagacacggaaag

SEQ ID NO: 18354 - DNA, 19 bp, synthetic construct
  misc_feature 1..19: note = Artificial sequence related to HLA knockouts in cell therapy
  source 1..19: mol_type = other DNA
cggggagacacggaaagtg

SEQ ID NO: 18355 - DNA, 19 bp, synthetic construct
  misc_feature 1..19: note = Artificial sequence related to HLA knockouts in cell therapy
  source 1..19: mol_type = other DNA
ggcccactcacagactcac

SEQ ID NO: 18356 - DNA, 19 bp, synthetic construct
  misc_feature 1..19: note = Artificial sequence related to HLA knockouts in cell therapy
  source 1..19: mol_type = other DNA
gcccactcacagactcacc

SEQ ID NO: 18357 - DNA, 19 bp, synthetic construct
  misc_feature 1..19: note = Artificial sequence related to HLA knockouts in cell therapy
  source 1..19: mol_type = other DNA
cccactcacagactcaccg

SEQ ID NO: 18358 - DNA, 19 bp, synthetic construct
  misc_feature 1..19: note = Artificial sequence related to HLA knockouts in cell therapy
  source 1..19: mol_type = other DNA
cagactcaccgagtggacc

SEQ ID NO: 18359 - DNA, 19 bp, synthetic construct
  misc_feature 1..19: note = Artificial sequence related to HLA knockouts in cell therapy
  source 1..19: mol_type = other DNA
gactcaccgagtggacctg

SEQ ID NO: 18360 - DNA, 19 bp, synthetic construct
  misc_feature 1..19: note = Artificial sequence related to HLA knockouts in cell therapy
  source 1..19: mol_type = other DNA
actcaccgagtggacctgg

SEQ ID NO: 18361 - DNA, 19 bp, synthetic construct
  misc_feature 1..19: note = Artificial sequence related to HLA knockouts in cell therapy
  source 1..19: mol_type = other DNA
ctcaccgagtggacctggg

SEQ ID NO: 18362 - DNA, 19 bp, synthetic construct
  misc_feature 1..19: note = Artificial sequence related to HLA knockouts in cell therapy
  source 1..19: mol_type = other DNA
tcaccgagtggacctgggg

SEQ ID NO: 18363 - DNA, 19 bp, synthetic construct
  misc_feature 1..19: note = Artificial sequence related to HLA knockouts in cell therapy
  source 1..19: mol_type = other DNA
caccgagtggacctgggga

SEQ ID NO: 18364 - DNA, 19 bp, synthetic construct
  misc_feature 1..19: note = Artificial sequence related to HLA knockouts in cell therapy
  source 1..19: mol_type = other DNA
accgagtggacctggggac

SEQ ID NO: 18365 - DNA, 19 bp, synthetic construct
  misc_feature 1..19: note = Artificial sequence related to HLA knockouts in cell therapy
  source 1..19: mol_type = other DNA
ccgagtggacctggggacc

SEQ ID NO: 18366 - DNA, 19 bp, synthetic construct
  misc_feature 1..19: note = Artificial sequence related to HLA knockouts in cell therapy
  source 1..19: mol_type = other DNA
cgagtggacctggggaccc

SEQ ID NO: 18367 - DNA, 19 bp, synthetic construct
  misc_feature 1..19: note = Artificial sequence related to HLA knockouts in cell therapy
  source 1..19: mol_type = other DNA
gagtggacctggggaccct

SEQ ID NO: 18368 - DNA, 19 bp, synthetic construct
  misc_feature 1..19: note = Artificial sequence related to HLA knockouts in cell therapy
  source 1..19: mol_type = other DNA
agtggacctggggaccctg

SEQ ID NO: 18369 - DNA, 19 bp, synthetic construct
  misc_feature 1..19: note = Artificial sequence related to HLA knockouts in cell therapy
  source 1..19: mol_type = other DNA
gtggacctggggaccctgc

SEQ ID NO: 18370 - DNA, 19 bp, synthetic construct
  misc_feature 1..19: note = Artificial sequence related to HLA knockouts in cell therapy
  source 1..19: mol_type = other DNA
tggacctggggaccctgcg

SEQ ID NO: 18371 - DNA, 19 bp, synthetic construct
  misc_feature 1..19: note = Artificial sequence related to HLA knockouts in cell therapy
  source 1..19: mol_type = other DNA
ggacctggggaccctgcgc

SEQ ID NO: 18372 - DNA, 19 bp, synthetic construct
  misc_feature 1..19: note = Artificial sequence related to HLA knockouts in cell therapy
  source 1..19: mol_type = other DNA
gacctggggaccctgcgcg

SEQ ID NO: 18373 - DNA, 19 bp, synthetic construct
  misc_feature 1..19: note = Artificial sequence related to HLA knockouts in cell therapy
  source 1..19: mol_type = other DNA
acctggggaccctgcgcgg

SEQ ID NO: 18374 - DNA, 19 bp, synthetic construct
  misc_feature 1..19: note = Artificial sequence related to HLA knockouts in cell therapy
  source 1..19: mol_type = other DNA
cctggggaccctgcgcggc

SEQ ID NO: 18375 - DNA, 19 bp, synthetic construct
  misc_feature 1..19: note = Artificial sequence related to HLA knockouts in cell therapy
  source 1..19: mol_type = other DNA
ctggggaccctgcgcggct

SEQ ID NO: 18376 - DNA, 19 bp, synthetic construct
  misc_feature 1..19: note = Artificial sequence related to HLA knockouts in cell therapy
  source 1..19: mol_type = other DNA
tggggaccctgcgcggcta

SEQ ID NO: 18377 - DNA, 19 bp, synthetic construct
  misc_feature 1..19: note = Artificial sequence related to HLA knockouts in cell therapy
  source 1..19: mol_type = other DNA
ggggaccctgcgcggctac

SEQ ID NO: 18378 - DNA, 19 bp, synthetic construct
  misc_feature 1..19: note = Artificial sequence related to HLA knockouts in cell therapy
  source 1..19: mol_type = other DNA
gggaccctgcgcggctact

SEQ ID NO: 18379 - DNA, 19 bp, synthetic construct
  misc_feature 1..19: note = Artificial sequence related to HLA knockouts in cell therapy
  source 1..19: mol_type = other DNA
ggaccctgcgcggctacta

SEQ ID NO: 18380 - DNA, 19 bp, synthetic construct
  misc_feature 1..19: note = Artificial sequence related to HLA knockouts in cell therapy
  source 1..19: mol_type = other DNA
gaccctgcgcggctactac

SEQ ID NO: 18381 - DNA, 19 bp, synthetic construct
  misc_feature 1..19: note = Artificial sequence related to HLA knockouts in cell therapy
  source 1..19: mol_type = other DNA
accctgcgcggctactaca

SEQ ID NO: 18382 - DNA, 19 bp, synthetic construct
  misc_feature 1..19: note = Artificial sequence related to HLA knockouts in cell therapy
  source 1..19: mol_type = other DNA
ccctgcgcggctactacaa

SEQ ID NO: 18383 - DNA, 19 bp, synthetic construct
  misc_feature 1..19: note = Artificial sequence related to HLA knockouts in cell therapy
  source 1..19: mol_type = other DNA
cctgcgcggctactacaac

SEQ ID NO: 18384 - DNA, 19 bp, synthetic construct
  misc_feature 1..19: note = Artificial sequence related to HLA knockouts in cell therapy
  source 1..19: mol_type = other DNA
ctgcgcggctactacaacc

SEQ ID NO: 18385 - DNA, 19 bp, synthetic construct
  misc_feature 1..19: note = Artificial sequence related to HLA knockouts in cell therapy
  source 1..19: mol_type = other DNA
gcgcggctactacaaccag

SEQ ID NO: 18386 - DNA, 19 bp, synthetic construct
  misc_feature 1..19: note = Artificial sequence related to HLA knockouts in cell therapy
  source 1..19: mol_type = other DNA
ctacaaccagagcgaggcc

SEQ ID NO: 18387 - DNA, 19 bp, synthetic construct
  misc_feature 1..19: note = Artificial sequence related to HLA knockouts in cell therapy
  source 1..19: mol_type = other DNA
tacaaccagagcgaggccg

SEQ ID NO: 18388 - DNA, 19 bp, synthetic construct
  misc_feature 1..19: note = Artificial sequence related to HLA knockouts in cell therapy
  source 1..19: mol_type = other DNA
acaaccagagcgaggccgg

SEQ ID NO: 18389 - DNA, 19 bp, synthetic construct
  misc_feature 1..19: note = Artificial sequence related to HLA knockouts in cell therapy
  source 1..19: mol_type = other DNA
caaccagagcgaggccggt

SEQ ID NO: 18390 - DNA, 19 bp, synthetic construct
  misc_feature 1..19: note = Artificial sequence related to HLA knockouts in cell therapy
  source 1..19: mol_type = other DNA
aaccagagcgaggccggtt

SEQ ID NO: 18391 - DNA, 19 bp, synthetic construct
  misc_feature 1..19: note = Artificial sequence related to HLA knockouts in cell therapy
  source 1..19: mol_type = other DNA
accagagcgaggccggttc

SEQ ID NO: 18392 - DNA, 19 bp, synthetic construct
  misc_feature 1..19: note = Artificial sequence related to HLA knockouts in cell therapy
  source 1..19: mol_type = other DNA
ccagagcgaggccggttct

SEQ ID NO: 18393 - DNA, 19 bp, synthetic construct
  misc_feature 1..19: note = Artificial sequence related to HLA knockouts in cell therapy
  source 1..19: mol_type = other DNA
cagagcgaggccggttctc

SEQ ID NO: 18394 - DNA, 19 bp, synthetic construct
  misc_feature 1..19: note = Artificial sequence related to HLA knockouts in cell therapy
  source 1..19: mol_type = other DNA
agagcgaggccggttctca

SEQ ID NO: 18395 - DNA, 19 bp, synthetic construct
  misc_feature 1..19: note = Artificial sequence related to HLA knockouts in cell therapy
  source 1..19: mol_type = other DNA
gagcgaggccggttctcac

SEQ ID NO: 18396 - DNA, 19 bp, synthetic construct
  misc_feature 1..19: note = Artificial sequence related to HLA knockouts in cell therapy
  source 1..19: mol_type = other DNA
agcgaggccggttctcaca

SEQ ID NO: 18397 - DNA, 19 bp, synthetic construct
  misc_feature 1..19: note = Artificial sequence related to HLA knockouts in cell therapy
  source 1..19: mol_type = other DNA
gcgaggccggttctcacac

SEQ ID NO: 18398 - DNA, 19 bp, synthetic construct
  misc_feature 1..19: note = Artificial sequence related to HLA knockouts in cell therapy
  source 1..19: mol_type = other DNA
cgaggccggttctcacacc

SEQ ID NO: 18399 - DNA, 19 bp, synthetic construct
  misc_feature 1..19: note = Artificial sequence related to HLA knockouts in cell therapy
  source 1..19: mol_type = other DNA
gaggccggttctcacaccg

SEQ ID NO: 18400 - DNA, 19 bp, synthetic construct
  misc_feature 1..19: note = Artificial sequence related to HLA knockouts in cell therapy
  source 1..19: mol_type = other DNA
aggccggttctcacaccgt

SEQ ID NO: 18401 - DNA, 19 bp, synthetic construct
  misc_feature 1..19: note = Artificial sequence related to HLA knockouts in cell therapy
  source 1..19: mol_type = other DNA
ggccggttctcacaccgtc

SEQ ID NO: 18402 - DNA, 19 bp, synthetic construct
  misc_feature 1..19: note = Artificial sequence related to HLA knockouts in cell therapy
  source 1..19: mol_type = other DNA
gccggttctcacaccgtcc

SEQ ID NO: 18403 - DNA, 19 bp, synthetic construct
  misc_feature 1..19: note = Artificial sequence related to HLA knockouts in cell therapy
  source 1..19: mol_type = other DNA
ccggttctcacaccgtcca

SEQ ID NO: 18404 - DNA, 19 bp, synthetic construct
  misc_feature 1..19: note = Artificial sequence related to HLA knockouts in cell therapy
  source 1..19: mol_type = other DNA
cggttctcacaccgtccag

SEQ ID NO: 18405 - DNA, 19 bp, synthetic construct
  misc_feature 1..19: note = Artificial sequence related to HLA knockouts in cell therapy
  source 1..19: mol_type = other DNA
tgtatggctgcgacgtggg

SEQ ID NO: 18406 - DNA, 19 bp, synthetic construct
  misc_feature 1..19: note = Artificial sequence related to HLA knockouts in cell therapy
  source 1..19: mol_type = other DNA
gtatggctgcgacgtgggg

SEQ ID NO: 18407 - DNA, 19 bp, synthetic construct
  misc_feature 1..19: note = Artificial sequence related to HLA knockouts in cell therapy
  source 1..19: mol_type = other DNA
tatggctgcgacgtggggt

SEQ ID NO: 18408 - DNA, 19 bp, synthetic construct
  misc_feature 1..19: note = Artificial sequence related to HLA knockouts in cell therapy
  source 1..19: mol_type = other DNA
atggctgcgacgtggggtc

SEQ ID NO: 18409 - DNA, 19 bp, synthetic construct
  misc_feature 1..19: note = Artificial sequence related to HLA knockouts in cell therapy
  source 1..19: mol_type = other DNA
tggctgcgacgtggggtcg

SEQ ID NO: 18410 - DNA, 19 bp, synthetic construct
  misc_feature 1..19: note = Artificial sequence related to HLA knockouts in cell therapy
  source 1..19: mol_type = other DNA
ggctgcgacgtggggtcgg

SEQ ID NO: 18411 - DNA, 19 bp, synthetic construct
  misc_feature 1..19: note = Artificial sequence related to HLA knockouts in cell therapy
  source 1..19: mol_type = other DNA
gctgcgacgtggggtcgga

SEQ ID NO: 18412 - DNA, 19 bp, synthetic construct
  misc_feature 1..19: note = Artificial sequence related to HLA knockouts in cell therapy
  source 1..19: mol_type = other DNA
ctgcgacgtggggtcggac

SEQ ID NO: 18413 - DNA, 19 bp, synthetic construct
  misc_feature 1..19: note = Artificial sequence related to HLA knockouts in cell therapy
  source 1..19: mol_type = other DNA
tgcgacgtggggtcggact

SEQ ID NO: 18414 - DNA, 19 bp, synthetic construct
  misc_feature 1..19: note = Artificial sequence related to HLA knockouts in cell therapy
  source 1..19: mol_type = other DNA
gcgacgtggggtcggactg

SEQ ID NO: 18415 - DNA, 19 bp, synthetic construct
  misc_feature 1..19: note = Artificial sequence related to HLA knockouts in cell therapy
  source 1..19: mol_type = other DNA
cgacgtggggtcggactgg

SEQ ID NO: 18416 - DNA, 19 bp, synthetic construct
  misc_feature 1..19: note = Artificial sequence related to HLA knockouts in cell therapy
  source 1..19: mol_type = other DNA
gacgtggggtcggactggc

SEQ ID NO: 18417 - DNA, 19 bp, synthetic construct
  misc_feature 1..19: note = Artificial sequence related to HLA knockouts in cell therapy
  source 1..19: mol_type = other DNA
acgtggggtcggactggcg

SEQ ID NO: 18418 - DNA, 19 bp, synthetic construct
  misc_feature 1..19: note = Artificial sequence related to HLA knockouts in cell therapy
  source 1..19: mol_type = other DNA
cgtggggtcggactggcgc

SEQ ID NO: 18419 - DNA, 19 bp, synthetic construct
  misc_feature 1..19: note = Artificial sequence related to HLA knockouts in cell therapy
  source 1..19: mol_type = other DNA
gtggggtcggactggcgct

SEQ ID NO: 18420 - DNA, 19 bp, synthetic construct
  misc_feature 1..19: note = Artificial sequence related to HLA knockouts in cell therapy
  source 1..19: mol_type = other DNA
tggggtcggactggcgctt

SEQ ID NO: 18421 - DNA, 19 bp, synthetic construct
  misc_feature 1..19: note = Artificial sequence related to HLA knockouts in cell therapy
  source 1..19: mol_type = other DNA
ggggtcggactggcgcttc

SEQ ID NO: 18422 - DNA, 19 bp, synthetic construct
  misc_feature 1..19: note = Artificial sequence related to HLA knockouts in cell therapy
  source 1..19: mol_type = other DNA
gggtcggactggcgcttcc

SEQ ID NO: 18423 - DNA, 19 bp, synthetic construct
  misc_feature 1..19: note = Artificial sequence related to HLA knockouts in cell therapy
  source 1..19: mol_type = other DNA
ggtcggactggcgcttcct

SEQ ID NO: 18424 - DNA, 19 bp, synthetic construct
  misc_feature 1..19: note = Artificial sequence related to HLA knockouts in cell therapy
  source 1..19: mol_type = other DNA
gtcggactggcgcttcctc

SEQ ID NO: 18425 - DNA, 19 bp, synthetic construct
  misc_feature 1..19: note = Artificial sequence related to HLA knockouts in cell therapy
  source 1..19: mol_type = other DNA
tcggactggcgcttcctcc

SEQ ID NO: 18426 - DNA, 19 bp, synthetic construct
  misc_feature 1..19: note = Artificial sequence related to HLA knockouts in cell therapy
  source 1..19: mol_type = other DNA
cggactggcgcttcctccg

SEQ ID NO: 18427 - DNA, 19 bp, synthetic construct
  misc_feature 1..19: note = Artificial sequence related to HLA knockouts in cell therapy
  source 1..19: mol_type = other DNA
ggactggcgcttcctccgc

SEQ ID NO: 18428 - DNA, 19 bp, synthetic construct
  misc_feature 1..19: note = Artificial sequence related to HLA knockouts in cell therapy
  source 1..19: mol_type = other DNA
gactggcgcttcctccgcg

SEQ ID NO: 18429 - DNA, 19 bp, synthetic construct
  misc_feature 1..19: note = Artificial sequence related to HLA knockouts in cell therapy
  source 1..19: mol_type = other DNA
actggcgcttcctccgcgg

SEQ ID NO: 18430 - DNA, 19 bp, synthetic construct
  misc_feature 1..19: note = Artificial sequence related to HLA knockouts in cell therapy
  source 1..19: mol_type = other DNA
ctggcgcttcctccgcggg

SEQ ID NO: 18431 - DNA, 19 bp, synthetic construct
  misc_feature 1..19: note = Artificial sequence related to HLA knockouts in cell therapy
  source 1..19: mol_type = other DNA
tggcgcttcctccgcgggt

SEQ ID NO: 18432 - DNA, 19 bp, synthetic construct
  misc_feature 1..19: note = Artificial sequence related to HLA knockouts in cell therapy
  source 1..19: mol_type = other DNA
ggcgcttcctccgcgggta

SEQ ID NO: 18433 - DNA, 19 bp, synthetic construct
  misc_feature 1..19: note = Artificial sequence related to HLA knockouts in cell therapy
  source 1..19: mol_type = other DNA
gcgcttcctccgcgggtac

SEQ ID NO: 18434 - DNA, 19 bp, synthetic construct
  misc_feature 1..19: note = Artificial sequence related to HLA knockouts in cell therapy
  source 1..19: mol_type = other DNA
cgcttcctccgcgggtacc

SEQ ID NO: 18435 - DNA, 19 bp, synthetic construct
  misc_feature 1..19: note = Artificial sequence related to HLA knockouts in cell therapy
  source 1..19: mol_type = other DNA
gcttcctccgcgggtacca

SEQ ID NO: 18436 - DNA, 19 bp, synthetic construct
  misc_feature 1..19: note = Artificial sequence related to HLA knockouts in cell therapy
  source 1..19: mol_type = other DNA
cttcctccgcgggtaccac

SEQ ID NO: 18437 - DNA, 19 bp, synthetic construct
  misc_feature 1..19: note = Artificial sequence related to HLA knockouts in cell therapy
  source 1..19: mol_type = other DNA
ttcctccgcgggtaccacc

SEQ ID NO: 18438 - DNA, 19 bp, synthetic construct
  misc_feature 1..19: note = Artificial sequence related to HLA knockouts in cell therapy
  source 1..19: mol_type = other DNA
tcctccgcgggtaccacca

SEQ ID NO: 18439 - DNA, 19 bp, synthetic construct
  misc_feature 1..19: note = Artificial sequence related to HLA knockouts in cell therapy
  source 1..19: mol_type = other DNA
cctccgcgggtaccaccag

SEQ ID NO: 18440 - DNA, 19 bp, synthetic construct
  misc_feature 1..19: note = Artificial sequence related to HLA knockouts in cell therapy
  source 1..19: mol_type = other DNA
ctccgcgggtaccaccagt

SEQ ID NO: 18441 - DNA, 19 bp, synthetic construct
  misc_feature 1..19: note = Artificial sequence related to HLA knockouts in cell therapy
  source 1..19: mol_type = other DNA
tccgcgggtaccaccagta

SEQ ID NO: 18442 - DNA, 19 bp, synthetic construct
  misc_feature 1..19: note = Artificial sequence related to HLA knockouts in cell therapy
  source 1..19: mol_type = other DNA
ccgcgggtaccaccagtac

SEQ ID NO: 18443 - DNA, 19 bp, synthetic construct
  misc_feature 1..19: note = Artificial sequence related to HLA knockouts in cell therapy
  source 1..19: mol_type = other DNA
cgcgggtaccaccagtacg

SEQ ID NO: 18444 - DNA, 19 bp, synthetic construct
  misc_feature 1..19: note = Artificial sequence related to HLA knockouts in cell therapy
  source 1..19: mol_type = other DNA
gcgggtaccaccagtacgc

SEQ ID NO: 18445 - DNA, 19 bp, synthetic construct
  misc_feature 1..19: note = Artificial sequence related to HLA knockouts in cell therapy
  source 1..19: mol_type = other DNA
cgggtaccaccagtacgcc

SEQ ID NO: 18446 - DNA, 19 bp, synthetic construct
  misc_feature 1..19: note = Artificial sequence related to HLA knockouts in cell therapy
  source 1..19: mol_type = other DNA
gggtaccaccagtacgcct

SEQ ID NO: 18447 - DNA, 19 bp, synthetic construct
  misc_feature 1..19: note = Artificial sequence related to HLA knockouts in cell therapy
  source 1..19: mol_type = other DNA
ccaccagtacgcctacgac

SEQ ID NO: 18448 - DNA, 19 bp, synthetic construct
  misc_feature 1..19: note = Artificial sequence related to HLA knockouts in cell therapy
  source 1..19: mol_type = other DNA
caccagtacgcctacgacg

SEQ ID NO: 18449 - DNA, 19 bp, synthetic construct
  misc_feature 1..19: note = Artificial sequence related to HLA knockouts in cell therapy
  source 1..19: mol_type = other DNA
accagtacgcctacgacgg

SEQ ID NO: 18450 - DNA, 19 bp, synthetic construct
  misc_feature 1..19: note = Artificial sequence related to HLA knockouts in cell therapy
  source 1..19: mol_type = other DNA
ccagtacgcctacgacggc

SEQ ID NO: 18451 - DNA, 19 bp, synthetic construct
  misc_feature 1..19: note = Artificial sequence related to HLA knockouts in cell therapy
  source 1..19: mol_type = other DNA
cagtacgcctacgacggca

SEQ ID NO: 18452 - DNA, 19 bp, synthetic construct
  misc_feature 1..19: note = Artificial sequence related to HLA knockouts in cell therapy
  source 1..19: mol_type = other DNA
gtacgcctacgacggcaag

SEQ ID NO: 18453 - DNA, 19 bp, synthetic construct
  misc_feature 1..19: note = Artificial sequence related to HLA knockouts in cell therapy
  source 1..19: mol_type = other DNA
tacgcctacgacggcaagg

SEQ ID NO: 18454 - DNA, 19 bp, synthetic construct
  misc_feature 1..19: note = Artificial sequence related to HLA knockouts in cell therapy
  source 1..19: mol_type = other DNA
acgcctacgacggcaagga

SEQ ID NO: 18455 - DNA, 19 bp, synthetic construct
  misc_feature 1..19: note = Artificial sequence related to HLA knockouts in cell therapy
  source 1..19: mol_type = other DNA
cgcctacgacggcaaggat

SEQ ID NO: 18456 - DNA, 19 bp, synthetic construct
  misc_feature 1..19: note = Artificial sequence related to HLA knockouts in cell therapy
  source 1..19: mol_type = other DNA
cgccctgaaagaggacctg

SEQ ID NO: 18457 - DNA, 19 bp, synthetic construct
  misc_feature 1..19: note = Artificial sequence related to HLA knockouts in cell therapy
  source 1..19: mol_type = other DNA
gccctgaaagaggacctgc

SEQ ID NO: 18458 - DNA, 19 bp, synthetic construct
  misc_feature 1..19: note = Artificial sequence related to HLA knockouts in cell therapy
  source 1..19: mol_type = other DNA
ccctgaaagaggacctgcg

SEQ ID NO: 18459 - DNA, 19 bp, synthetic construct
  misc_feature 1..19: note = Artificial sequence related to HLA knockouts in cell therapy
  source 1..19: mol_type = other DNA
cctgaaagaggacctgcgc

SEQ ID NO: 18460 - DNA, 19 bp, synthetic construct
  misc_feature 1..19: note = Artificial sequence related to HLA knockouts in cell therapy
  source 1..19: mol_type = other DNA
aggacctgcgctcttggac

SEQ ID NO: 18461 - DNA, 19 bp, synthetic construct
  misc_feature 1..19: note = Artificial sequence related to HLA knockouts in cell therapy
  source 1..19: mol_type = other DNA
ggacctgcgctcttggacc

SEQ ID NO: 18462 - DNA, 19 bp, synthetic construct
  misc_feature 1..19: note = Artificial sequence related to HLA knockouts in cell therapy
  source 1..19: mol_type = other DNA
gacctgcgctcttggaccg

SEQ ID NO: 18463 - DNA, 19 bp, synthetic construct
  misc_feature 1..19: note = Artificial sequence related to HLA knockouts in cell therapy
  source 1..19: mol_type = other DNA
acctgcgctcttggaccgc

SEQ ID NO: 18464 - DNA, 19 bp, synthetic construct
  misc_feature 1..19: note = Artificial sequence related to HLA knockouts in cell therapy
  source 1..19: mol_type = other DNA
cctgcgctcttggaccgcg

SEQ ID NO: 18465 - DNA, 19 bp, synthetic construct
  misc_feature 1..19: note = Artificial sequence related to HLA knockouts in cell therapy
  source 1..19: mol_type = other DNA
ctgcgctcttggaccgcgg

SEQ ID NO: 18466 - DNA, 19 bp, synthetic construct
  misc_feature 1..19: note = Artificial sequence related to HLA knockouts in cell therapy
  source 1..19: mol_type = other DNA
tgcgctcttggaccgcggc

SEQ ID NO: 18467 - DNA, 19 bp, synthetic construct
  misc_feature 1..19: note = Artificial sequence related to HLA knockouts in cell therapy
  source 1..19: mol_type = other DNA
gcgctcttggaccgcggcg

SEQ ID NO: 18468 - DNA, 19 bp, synthetic construct
  misc_feature 1..19: note = Artificial sequence related to HLA knockouts in cell therapy
  source 1..19: mol_type = other DNA
cgctcttggaccgcggcgg

SEQ ID NO: 18469 - DNA, 19 bp, synthetic construct
  misc_feature 1..19: note = Artificial sequence related to HLA knockouts in cell therapy
  source 1..19: mol_type = other DNA
gctcttggaccgcggcgga

SEQ ID NO: 18470 - DNA, 19 bp, synthetic construct
  misc_feature 1..19: note = Artificial sequence related to HLA knockouts in cell therapy
  source 1..19: mol_type = other DNA
ctcttggaccgcggcggac

SEQ ID NO: 18471 - DNA, 19 bp, synthetic construct
  misc_feature 1..19: note = Artificial sequence related to HLA knockouts in cell therapy
  source 1..19: mol_type = other DNA
tcttggaccgcggcggaca

SEQ ID NO: 18472 - DNA, 19 bp, synthetic construct
  misc_feature 1..19: note = Artificial sequence related to HLA knockouts in cell therapy
  source 1..19: mol_type = other DNA
cttggaccgcggcggacat

SEQ ID NO: 18473 - DNA, 19 bp, synthetic construct
  misc_feature 1..19: note = Artificial sequence related to HLA knockouts in cell therapy
  source 1..19: mol_type = other DNA
ttggaccgcggcggacatg

SEQ ID NO: 18474 - DNA, 19 bp, synthetic construct
  misc_feature 1..19: note = Artificial sequence related to HLA knockouts in cell therapy
  source 1..19: mol_type = other DNA
tggaccgcggcggacatgg

SEQ ID NO: 18475 - DNA, 19 bp, synthetic construct
  misc_feature 1..19: note = Artificial sequence related to HLA knockouts in cell therapy
  source 1..19: mol_type = other DNA
ggaccgcggcggacatggc

SEQ ID NO: 18476 - DNA, 19 bp, synthetic construct
  misc_feature 1..19: note = Artificial sequence related to HLA knockouts in cell therapy
  source 1..19: mol_type = other DNA
gaccgcggcggacatggca

SEQ ID NO: 18477 - DNA, 19 bp, synthetic construct
  misc_feature 1..19: note = Artificial sequence related to HLA knockouts in cell therapy
  source 1..19: mol_type = other DNA
accgcggcggacatggcag

SEQ ID NO: 18478 - DNA, 19 bp, synthetic construct
  misc_feature 1..19: note = Artificial sequence related to HLA knockouts in cell therapy
  source 1..19: mol_type = other DNA
ccgcggcggacatggcagc

SEQ ID NO: 18479 - DNA, 19 bp, synthetic construct
  misc_feature 1..19: note = Artificial sequence related to HLA knockouts in cell therapy
  source 1..19: mol_type = other DNA
cgcggcggacatggcagct

SEQ ID NO: 18480 - DNA, 19 bp, synthetic construct
  misc_feature 1..19: note = Artificial sequence related to HLA knockouts in cell therapy
  source 1..19: mol_type = other DNA
gcggcggacatggcagctc

SEQ ID NO: 18481 - DNA, 19 bp, synthetic construct
  misc_feature 1..19: note = Artificial sequence related to HLA knockouts in cell therapy
  source 1..19: mol_type = other DNA
cggcggacatggcagctca

SEQ ID NO: 18482 - DNA, 19 bp, synthetic construct
  misc_feature 1..19: note = Artificial sequence related to HLA knockouts in cell therapy
  source 1..19: mol_type = other DNA
ggcggacatggcagctcag

SEQ ID NO: 18483 - DNA, 19 bp, synthetic construct
  misc_feature 1..19: note = Artificial sequence related to HLA knockouts in cell therapy
  source 1..19: mol_type = other DNA
gcggacatggcagctcaga

SEQ ID NO: 18484 - DNA, 19 bp, synthetic construct
  misc_feature 1..19: note = Artificial sequence related to HLA knockouts in cell therapy
  source 1..19: mol_type = other DNA
cggacatggcagctcagac

SEQ ID NO: 18485 - DNA, 19 bp, synthetic construct
  misc_feature 1..19: note = Artificial sequence related to HLA knockouts in cell therapy
  source 1..19: mol_type = other DNA
ggacatggcagctcagacc

SEQ ID NO: 18486 - DNA, 19 bp, synthetic construct
  misc_feature 1..19: note = Artificial sequence related to HLA knockouts in cell therapy
  source 1..19: mol_type = other DNA
catggcagctcagaccacc

SEQ ID NO: 18487 - DNA, 19 bp, synthetic construct
  misc_feature 1..19: note = Artificial sequence related to HLA knockouts in cell therapy
  source 1..19: mol_type = other DNA
ggcagctcagaccaccaag

SEQ ID NO: 18488 - DNA, 19 bp, synthetic construct
  misc_feature 1..19: note = Artificial sequence related to HLA knockouts in cell therapy
  source 1..19: mol_type = other DNA
gcagctcagaccaccaagc

SEQ ID NO: 18489 - DNA, 19 bp, synthetic construct
  misc_feature 1..19: note = Artificial sequence related to HLA knockouts in cell therapy
  source 1..19: mol_type = other DNA
ccaagcacaagtgggaggc

SEQ ID NO: 18490 - DNA, 19 bp, synthetic construct
  misc_feature 1..19: note = Artificial sequence related to HLA knockouts in cell therapy
  source 1..19: mol_type = other DNA
caagcacaagtgggaggcg

SEQ ID NO: 18491 - DNA, 19 bp, synthetic construct
  misc_feature 1..19: note = Artificial sequence related to HLA knockouts in cell therapy
  source 1..19: mol_type = other DNA
aagcacaagtgggaggcgg

SEQ ID NO: 18492 - DNA, 19 bp, synthetic construct
  misc_feature 1..19: note = Artificial sequence related to HLA knockouts in cell therapy
  source 1..19: mol_type = other DNA
agcacaagtgggaggcggc

SEQ ID NO: 18493 - DNA, 19 bp, synthetic construct
  misc_feature 1..19: note = Artificial sequence related to HLA knockouts in cell therapy
  source 1..19: mol_type = other DNA
gcacaagtgggaggcggcc

SEQ ID NO: 18494 - DNA, 19 bp, synthetic construct
  misc_feature 1..19: note = Artificial sequence related to HLA knockouts in cell therapy
  source 1..19: mol_type = other DNA
cacaagtgggaggcggccc

SEQ ID NO: 18495 - DNA, 19 bp, synthetic construct
  misc_feature 1..19: note = Artificial sequence related to HLA knockouts in cell therapy
  source 1..19: mol_type = other DNA
acaagtgggaggcggccca

SEQ ID NO: 18496 - DNA, 19 bp, synthetic construct
  misc_feature 1..19: note = Artificial sequence related to HLA knockouts in cell therapy
  source 1..19: mol_type = other DNA
caagtgggaggcggcccat

SEQ ID NO: 18497 - DNA, 19 bp, synthetic construct
  misc_feature 1..19: note = Artificial sequence related to HLA knockouts in cell therapy
  source 1..19: mol_type = other DNA
aagtgggaggcggcccatg

SEQ ID NO: 18498 - DNA, 19 bp, synthetic construct
  misc_feature 1..19: note = Artificial sequence related to HLA knockouts in cell therapy
  source 1..19: mol_type = other DNA
agtgggaggcggcccatgt

SEQ ID NO: 18499 - DNA, 19 bp, synthetic construct
  misc_feature 1..19: note = Artificial sequence related to HLA knockouts in cell therapy
  source 1..19: mol_type = other DNA
gtgggaggcggcccatgtg

SEQ ID NO: 18500 - DNA, 19 bp, synthetic construct
  misc_feature 1..19: note = Artificial sequence related to HLA knockouts in cell therapy
  source 1..19: mol_type = other DNA
tgggaggcggcccatgtgg

SEQ ID NO: 18501 - DNA, 19 bp, synthetic construct
  misc_feature 1..19: note = Artificial sequence related to HLA knockouts in cell therapy
  source 1..19: mol_type = other DNA
gggaggcggcccatgtggc

SEQ ID NO: 18502 - DNA, 19 bp, synthetic construct
  misc_feature 1..19: note = Artificial sequence related to HLA knockouts in cell therapy
  source 1..19: mol_type = other DNA
ggaggcggcccatgtggcg

SEQ ID NO: 18503 - DNA, 19 bp, synthetic construct
  misc_feature 1..19: note = Artificial sequence related to HLA knockouts in cell therapy
  source 1..19: mol_type = other DNA
gaggcggcccatgtggcgg

SEQ ID NO: 18504 - DNA, 19 bp, synthetic construct
  misc_feature 1..19: note = Artificial sequence related to HLA knockouts in cell therapy
  source 1..19: mol_type = other DNA
aggcggcccatgtggcgga

SEQ ID NO: 18505 - DNA, 19 bp, synthetic construct
  misc_feature 1..19: note = Artificial sequence related to HLA knockouts in cell therapy
  source 1..19: mol_type = other DNA
ggcggcccatgtggcggag

SEQ ID NO: 18506 - DNA, 19 bp, synthetic construct
  misc_feature 1..19: note = Artificial sequence related to HLA knockouts in cell therapy
  source 1..19: mol_type = other DNA
gcggcccatgtggcggagc

SEQ ID NO: 18507 - DNA, 19 bp, synthetic construct
  misc_feature 1..19: note = Artificial sequence related to HLA knockouts in cell therapy
  source 1..19: mol_type = other DNA
cggcccatgtggcggagca

SEQ ID NO: 18508 - DNA, 19 bp, synthetic construct
  misc_feature 1..19: note = Artificial sequence related to HLA knockouts in cell therapy
  source 1..19: mol_type = other DNA
ggcccatgtggcggagcag

SEQ ID NO: 18509 - DNA, 19 bp, synthetic construct
  misc_feature 1..19: note = Artificial sequence related to HLA knockouts in cell therapy
  source 1..19: mol_type = other DNA
gcccatgtggcggagcagt

SEQ ID NO: 18510 - DNA, 19 bp, synthetic construct
  misc_feature 1..19: note = Artificial sequence related to HLA knockouts in cell therapy
  source 1..19: mol_type = other DNA
cccatgtggcggagcagtt

SEQ ID NO: 18511 - DNA, 19 bp, synthetic construct
  misc_feature 1..19: note = Artificial sequence related to HLA knockouts in cell therapy
  source 1..19: mol_type = other DNA
ccatgtggcggagcagttg

SEQ ID NO: 18512 - DNA, 19 bp, synthetic construct
  misc_feature 1..19: note = Artificial sequence related to HLA knockouts in cell therapy
  source 1..19: mol_type = other DNA
gtggcggagcagttgagag

SEQ ID NO: 18513 - DNA, 19 bp, synthetic construct
  misc_feature 1..19: note = Artificial sequence related to HLA knockouts in cell therapy
  source 1..19: mol_type = other DNA
tggcggagcagttgagagc

SEQ ID NO: 18514 - DNA, 19 bp, synthetic construct
  misc_feature 1..19: note = Artificial sequence related to HLA knockouts in cell therapy
  source 1..19: mol_type = other DNA
ggcggagcagttgagagcc

SEQ ID NO: 18515 - DNA, 19 bp, synthetic construct
  misc_feature 1..19: note = Artificial sequence related to HLA knockouts in cell therapy
  source 1..19: mol_type = other DNA
gcggagcagttgagagcct

SEQ ID NO: 18516 - DNA, 19 bp, synthetic construct
  misc_feature 1..19: note = Artificial sequence related to HLA knockouts in cell therapy
  source 1..19: mol_type = other DNA
tgagagcctacctggaggg

SEQ ID NO: 18517 - DNA, 19 bp, synthetic construct
  misc_feature 1..19: note = Artificial sequence related to HLA knockouts in cell therapy
  source 1..19: mol_type = other DNA
gagagcctacctggagggc

SEQ ID NO: 18518 - DNA, 19 bp, synthetic construct
  misc_feature 1..19: note = Artificial sequence related to HLA knockouts in cell therapy
  source 1..19: mol_type = other DNA
agagcctacctggagggca

SEQ ID NO: 18519 - DNA, 19 bp, synthetic construct
  misc_feature 1..19: note = Artificial sequence related to HLA knockouts in cell therapy
  source 1..19: mol_type = other DNA
gagcctacctggagggcac

SEQ ID NO: 18520 - DNA, 19 bp, synthetic construct
  misc_feature 1..19: note = Artificial sequence related to HLA knockouts in cell therapy
  source 1..19: mol_type = other DNA
agcctacctggagggcacg

SEQ ID NO: 18521 - DNA, 19 bp, synthetic construct
  misc_feature 1..19: note = Artificial sequence related to HLA knockouts in cell therapy
  source 1..19: mol_type = other DNA
gcctacctggagggcacgt

SEQ ID NO: 18522 - DNA, 19 bp, synthetic construct
  misc_feature 1..19: note = Artificial sequence related to HLA knockouts in cell therapy
  source 1..19: mol_type = other DNA
cctacctggagggcacgtg

SEQ ID NO: 18523 - DNA, 19 bp, synthetic construct
  misc_feature 1..19: note = Artificial sequence related to HLA knockouts in cell therapy
  source 1..19: mol_type = other DNA
ctacctggagggcacgtgc

SEQ ID NO: 18524 - DNA, 19 bp, synthetic construct
  misc_feature 1..19: note = Artificial sequence related to HLA knockouts in cell therapy
  source 1..19: mol_type = other DNA
tacctggagggcacgtgcg

SEQ ID NO: 18525 - DNA, 19 bp, synthetic construct
  misc_feature 1..19: note = Artificial sequence related to HLA knockouts in cell therapy
  source 1..19: mol_type = other DNA
acctggagggcacgtgcgt

SEQ ID NO: 18526 - DNA, 19 bp, synthetic construct
  misc_feature 1..19: note = Artificial sequence related to HLA knockouts in cell therapy
  source 1..19: mol_type = other DNA
cctggagggcacgtgcgtg

SEQ ID NO: 18527 - DNA, 19 bp, synthetic construct
  misc_feature 1..19: note = Artificial sequence related to HLA knockouts in cell therapy
  source 1..19: mol_type = other DNA
ctggagggcacgtgcgtgg

SEQ ID NO: 18528 - DNA, 19 bp, synthetic construct
  misc_feature 1..19: note = Artificial sequence related to HLA knockouts in cell therapy
  source 1..19: mol_type = other DNA
tggagggcacgtgcgtgga

SEQ ID NO: 18529 - DNA, 19 bp, synthetic construct
  misc_feature 1..19: note = Artificial sequence related to HLA knockouts in cell therapy
  source 1..19: mol_type = other DNA
ggagggcacgtgcgtggag

SEQ ID NO: 18530 - DNA, 19 bp, synthetic construct
  misc_feature 1..19: note = Artificial sequence related to HLA knockouts in cell therapy
  source 1..19: mol_type = other DNA
gagggcacgtgcgtggagt

SEQ ID NO: 18531 - DNA, 19 bp, synthetic construct
  misc_feature 1..19: note = Artificial sequence related to HLA knockouts in cell therapy
  source 1..19: mol_type = other DNA
agggcacgtgcgtggagtg

SEQ ID NO: 18532 - DNA, 19 bp, synthetic construct
  misc_feature 1..19: note = Artificial sequence related to HLA knockouts in cell therapy
  source 1..19: mol_type = other DNA
gggcacgtgcgtggagtgg

SEQ ID NO: 18533 - DNA, 19 bp, synthetic construct
  misc_feature 1..19: note = Artificial sequence related to HLA knockouts in cell therapy
  source 1..19: mol_type = other DNA
ggcacgtgcgtggagtggc

SEQ ID NO: 18534 - DNA, 19 bp, synthetic construct
  misc_feature 1..19: note = Artificial sequence related to HLA knockouts in cell therapy
  source 1..19: mol_type = other DNA
gcacgtgcgtggagtggct

SEQ ID NO: 18535 - DNA, 19 bp, synthetic construct
  misc_feature 1..19: note = Artificial sequence related to HLA knockouts in cell therapy
  source 1..19: mol_type = other DNA
cacgtgcgtggagtggctc

SEQ ID NO: 18536 - DNA, 19 bp, synthetic construct
  misc_feature 1..19: note = Artificial sequence related to HLA knockouts in cell therapy
  source 1..19: mol_type = other DNA
acgtgcgtggagtggctcc

SEQ ID NO: 18537 - DNA, 19 bp, synthetic construct
  misc_feature 1..19: note = Artificial sequence related to HLA knockouts in cell therapy
  source 1..19: mol_type = other DNA
cgtgcgtggagtggctccg

SEQ ID NO: 18538 - DNA, 19 bp, synthetic construct
  misc_feature 1..19: note = Artificial sequence related to HLA knockouts in cell therapy
  source 1..19: mol_type = other DNA
gtgcgtggagtggctccgc

SEQ ID NO: 18539 - DNA, 19 bp, synthetic construct
  misc_feature 1..19: note = Artificial sequence related to HLA knockouts in cell therapy
  source 1..19: mol_type = other DNA
tgcgtggagtggctccgca

SEQ ID NO: 18540 - DNA, 19 bp, synthetic construct
  misc_feature 1..19: note = Artificial sequence related to HLA knockouts in cell therapy
  source 1..19: mol_type = other DNA
gcgtggagtggctccgcag

SEQ ID NO: 18541 - DNA, 19 bp, synthetic construct
  misc_feature 1..19: note = Artificial sequence related to HLA knockouts in cell therapy
  source 1..19: mol_type = other DNA
cgtggagtggctccgcaga

SEQ ID NO: 18542 - DNA, 19 bp, synthetic construct
  misc_feature 1..19: note = Artificial sequence related to HLA knockouts in cell therapy
  source 1..19: mol_type = other DNA
gtggagtggctccgcagat

SEQ ID NO: 18543 - DNA, 19 bp, synthetic construct
  misc_feature 1..19: note = Artificial sequence related to HLA knockouts in cell therapy
  source 1..19: mol_type = other DNA
ggagtggctccgcagatac

SEQ ID NO: 18544 - DNA, 19 bp, synthetic construct
  misc_feature 1..19: note = Artificial sequence related to HLA knockouts in cell therapy
  source 1..19: mol_type = other DNA
gagtggctccgcagatacc

SEQ ID NO: 18545 - DNA, 19 bp, synthetic construct
  misc_feature 1..19: note = Artificial sequence related to HLA knockouts in cell therapy
  source 1..19: mol_type = other DNA
tggctccgcagatacctgg

SEQ ID NO: 18546 - DNA, 19 bp, synthetic construct
  misc_feature 1..19: note = Artificial sequence related to HLA knockouts in cell therapy
  source 1..19: mol_type = other DNA
ggctccgcagatacctgga

SEQ ID NO: 18547 - DNA, 19 bp, synthetic construct
  misc_feature 1..19: note = Artificial sequence related to HLA knockouts in cell therapy
  source 1..19: mol_type = other DNA
gctccgcagatacctggag

SEQ ID NO: 18548 - DNA, 19 bp, synthetic construct
  misc_feature 1..19: note = Artificial sequence related to HLA knockouts in cell therapy
  source 1..19: mol_type = other DNA
cctggagaacgggaaggag

SEQ ID NO: 18549 - DNA, 19 bp, synthetic construct
  misc_feature 1..19: note = Artificial sequence related to HLA knockouts in cell therapy
  source 1..19: mol_type = other DNA
ggagaacgggaaggagacg

SEQ ID NO: 18550 - DNA, 19 bp, synthetic construct
  misc_feature 1..19: note = Artificial sequence related to HLA knockouts in cell therapy
  source 1..19: mol_type = other DNA
gagaacgggaaggagacgc

SEQ ID NO: 18551 - DNA, 19 bp, synthetic construct
  misc_feature 1..19: note = Artificial sequence related to HLA knockouts in cell therapy
  source 1..19: mol_type = other DNA
gaacgggaaggagacgctg

SEQ ID NO: 18552 - DNA, 19 bp, synthetic construct
  misc_feature 1..19: note = Artificial sequence related to HLA knockouts in cell therapy
  source 1..19: mol_type = other DNA
aacgggaaggagacgctgc

SEQ ID NO: 18553 - DNA, 19 bp, synthetic construct
  misc_feature 1..19: note = Artificial sequence related to HLA knockouts in cell therapy
  source 1..19: mol_type = other DNA
acgggaaggagacgctgca

SEQ ID NO: 18554 - DNA, 19 bp, synthetic construct
  misc_feature 1..19: note = Artificial sequence related to HLA knockouts in cell therapy
  source 1..19: mol_type = other DNA
cgggaaggagacgctgcag

SEQ ID NO: 18555 - DNA, 19 bp, synthetic construct
  misc_feature 1..19: note = Artificial sequence related to HLA knockouts in cell therapy
  source 1..19: mol_type = other DNA
gggaaggagacgctgcagc

SEQ ID NO: 18556 - DNA, 19 bp, synthetic construct
  misc_feature 1..19: note = Artificial sequence related to HLA knockouts in cell therapy
  source 1..19: mol_type = other DNA
ggaaggagacgctgcagcg

SEQ ID NO: 18557 - DNA, 19 bp, synthetic construct
  misc_feature 1..19: note = Artificial sequence related to HLA knockouts in cell therapy
  source 1..19: mol_type = other DNA
gaaggagacgctgcagcgc

SEQ ID NO: 18558 - DNA, 19 bp, synthetic construct
  misc_feature 1..19: note = Artificial sequence related to HLA knockouts in cell therapy
  source 1..19: mol_type = other DNA
aaggagacgctgcagcgca

SEQ ID NO: 18559 - DNA, 19 bp, synthetic construct
  misc_feature 1..19: note = Artificial sequence related to HLA knockouts in cell therapy
  source 1..19: mol_type = other DNA
aggagacgctgcagcgcac

SEQ ID NO: 18560 - DNA, 19 bp, synthetic construct
  misc_feature 1..19: note = Artificial sequence related to HLA knockouts in cell therapy
  source 1..19: mol_type = other DNA
ggagacgctgcagcgcacg

SEQ ID NO: 18561 - DNA, 19 bp, synthetic construct
  misc_feature 1..19: note = Artificial sequence related to HLA knockouts in cell therapy
  source 1..19: mol_type = other DNA
gagacgctgcagcgcacgg

SEQ ID NO: 18562 - DNA, 19 bp, synthetic construct
  misc_feature 1..19: note = Artificial sequence related to HLA knockouts in cell therapy
  source 1..19: mol_type = other DNA
agacgctgcagcgcacgga

SEQ ID NO: 18563 - DNA, 19 bp, synthetic construct
  misc_feature 1..19: note = Artificial sequence related to HLA knockouts in cell therapy
  source 1..19: mol_type = other DNA
gacgctgcagcgcacggac

SEQ ID NO: 18564 - DNA, 19 bp, synthetic construct
  misc_feature 1..19: note = Artificial sequence related to HLA knockouts in cell therapy
  source 1..19: mol_type = other DNA
acgctgcagcgcacggacg

SEQ ID NO: 18565 - DNA, 19 bp, synthetic construct
  misc_feature 1..19: note = Artificial sequence related to HLA knockouts in cell therapy
  source 1..19: mol_type = other DNA
cgctgcagcgcacggacgc

SEQ ID NO: 18566 - DNA, 19 bp, synthetic construct
  misc_feature 1..19: note = Artificial sequence related to HLA knockouts in cell therapy
  source 1..19: mol_type = other DNA
gctgcagcgcacggacgcc

SEQ ID NO: 18567 - DNA, 19 bp, synthetic construct
  misc_feature 1..19: note = Artificial sequence related to HLA knockouts in cell therapy
  source 1..19: mol_type = other DNA
ctgcagcgcacggacgccc

SEQ ID NO: 18568 - DNA, 19 bp, synthetic construct
  misc_feature 1..19: note = Artificial sequence related to HLA knockouts in cell therapy
  source 1..19: mol_type = other DNA
tgcagcgcacggacgcccc

SEQ ID NO: 18569 - DNA, 19 bp, synthetic construct
  misc_feature 1..19: note = Artificial sequence related to HLA knockouts in cell therapy
  source 1..19: mol_type = other DNA
gcagcgcacggacgccccc

SEQ ID NO: 18570 - DNA, 19 bp, synthetic construct
  misc_feature 1..19: note = Artificial sequence related to HLA knockouts in cell therapy
  source 1..19: mol_type = other DNA
cagcgcacggacgccccca

SEQ ID NO: 18571 - DNA, 19 bp, synthetic construct
  misc_feature 1..19: note = Artificial sequence related to HLA knockouts in cell therapy
  source 1..19: mol_type = other DNA
agcgcacggacgcccccaa

SEQ ID NO: 18572 - DNA, 19 bp, synthetic construct
  misc_feature 1..19: note = Artificial sequence related to HLA knockouts in cell therapy
  source 1..19: mol_type = other DNA
gcgcacggacgcccccaaa

SEQ ID NO: 18573 - DNA, 19 bp, synthetic construct
  misc_feature 1..19: note = Artificial sequence related to HLA knockouts in cell therapy
  source 1..19: mol_type = other DNA
cgcacggacgcccccaaaa

SEQ ID NO: 18574 - DNA, 19 bp, synthetic construct
  misc_feature 1..19: note = Artificial sequence related to HLA knockouts in cell therapy
  source 1..19: mol_type = other DNA
gcacggacgcccccaaaac

SEQ ID NO: 18575 - DNA, 19 bp, synthetic construct
  misc_feature 1..19: note = Artificial sequence related to HLA knockouts in cell therapy
  source 1..19: mol_type = other DNA
cacggacgcccccaaaacg

SEQ ID NO: 18576 - DNA, 19 bp, synthetic construct
  misc_feature 1..19: note = Artificial sequence related to HLA knockouts in cell therapy
  source 1..19: mol_type = other DNA
acggacgcccccaaaacgc

SEQ ID NO: 18577 - DNA, 19 bp, synthetic construct
  misc_feature 1..19: note = Artificial sequence related to HLA knockouts in cell therapy
  source 1..19: mol_type = other DNA
cggacgcccccaaaacgca

SEQ ID NO: 18578 - DNA, 19 bp, synthetic construct
  misc_feature 1..19: note = Artificial sequence related to HLA knockouts in cell therapy
  source 1..19: mol_type = other DNA
ggacgcccccaaaacgcat

SEQ ID NO: 18579 - DNA, 19 bp, synthetic construct
  misc_feature 1..19: note = Artificial sequence related to HLA knockouts in cell therapy
  source 1..19: mol_type = other DNA
caccacgctgtctctgacc

SEQ ID NO: 18580 - DNA, 19 bp, synthetic construct
  misc_feature 1..19: note = Artificial sequence related to HLA knockouts in cell therapy
  source 1..19: mol_type = other DNA
ccatgaagccaccctgagg

SEQ ID NO: 18581 - DNA, 19 bp, synthetic construct
  misc_feature 1..19: note = Artificial sequence related to HLA knockouts in cell therapy
  source 1..19: mol_type = other DNA
tgaagccaccctgaggtgc

SEQ ID NO: 18582 - DNA, 19 bp, synthetic construct
  misc_feature 1..19: note = Artificial sequence related to HLA knockouts in cell therapy
  source 1..19: mol_type = other DNA
gaagccaccctgaggtgct

SEQ ID NO: 18583 - DNA, 19 bp, synthetic construct
  misc_feature 1..19: note = Artificial sequence related to HLA knockouts in cell therapy
  source 1..19: mol_type = other DNA
aagccaccctgaggtgctg

SEQ ID NO: 18584 - DNA, 19 bp, synthetic construct
  misc_feature 1..19: note = Artificial sequence related to HLA knockouts in cell therapy
  source 1..19: mol_type = other DNA
agccaccctgaggtgctgg

SEQ ID NO: 18585 - DNA, 19 bp, synthetic construct
  misc_feature 1..19: note = Artificial sequence related to HLA knockouts in cell therapy
  source 1..19: mol_type = other DNA
gccaccctgaggtgctggg

SEQ ID NO: 18586 - DNA, 19 bp, synthetic construct
  misc_feature 1..19: note = Artificial sequence related to HLA knockouts in cell therapy
  source 1..19: mol_type = other DNA
ccaccctgaggtgctgggc

SEQ ID NO: 18587 - DNA, 19 bp, synthetic construct
  misc_feature 1..19: note = Artificial sequence related to HLA knockouts in cell therapy
  source 1..19: mol_type = other DNA
caccctgaggtgctgggcc

SEQ ID NO: 18588 - DNA, 19 bp, synthetic construct
  misc_feature 1..19: note = Artificial sequence related to HLA knockouts in cell therapy
  source 1..19: mol_type = other DNA
accctgaggtgctgggccc

SEQ ID NO: 18589 - DNA, 19 bp, synthetic construct
  misc_feature 1..19: note = Artificial sequence related to HLA knockouts in cell therapy
  source 1..19: mol_type = other DNA
ccctgaggtgctgggccct

SEQ ID NO: 18590 - DNA, 19 bp, synthetic construct
  misc_feature 1..19: note = Artificial sequence related to HLA knockouts in cell therapy
  source 1..19: mol_type = other DNA
cctgaggtgctgggccctg

SEQ ID NO: 18591 - DNA, 19 bp, synthetic construct
  misc_feature 1..19: note = Artificial sequence related to HLA knockouts in cell therapy
  source 1..19: mol_type = other DNA
ctgaggtgctgggccctga

SEQ ID NO: 18592 - DNA, 19 bp, synthetic construct
  misc_feature 1..19: note = Artificial sequence related to HLA knockouts in cell therapy
  source 1..19: mol_type = other DNA
tgaggtgctgggccctgag

SEQ ID NO: 18593 - DNA, 19 bp, synthetic construct
  misc_feature 1..19: note = Artificial sequence related to HLA knockouts in cell therapy
  source 1..19: mol_type = other DNA
gaggtgctgggccctgagc

SEQ ID NO: 18594 - DNA, 19 bp, synthetic construct
  misc_feature 1..19: note = Artificial sequence related to HLA knockouts in cell therapy
  source 1..19: mol_type = other DNA
aggtgctgggccctgagct

SEQ ID NO: 18595 - DNA, 19 bp, synthetic construct
  misc_feature 1..19: note = Artificial sequence related to HLA knockouts in cell therapy
  source 1..19: mol_type = other DNA
ggtgctgggccctgagctt

SEQ ID NO: 18596 - DNA, 19 bp, synthetic construct
  misc_feature 1..19: note = Artificial sequence related to HLA knockouts in cell therapy
  source 1..19: mol_type = other DNA
gtgctgggccctgagcttc

SEQ ID NO: 18597 - DNA, 19 bp, synthetic construct
  misc_feature 1..19: note = Artificial sequence related to HLA knockouts in cell therapy
  source 1..19: mol_type = other DNA
tgctgggccctgagcttct

SEQ ID NO: 18598 - DNA, 19 bp, synthetic construct
  misc_feature 1..19: note = Artificial sequence related to HLA knockouts in cell therapy
  source 1..19: mol_type = other DNA
gctgggccctgagcttcta

SEQ ID NO: 18599 - DNA, 19 bp, synthetic construct
  misc_feature 1..19: note = Artificial sequence related to HLA knockouts in cell therapy
  source 1..19: mol_type = other DNA
ctgggccctgagcttctac

SEQ ID NO: 18600 - DNA, 19 bp, synthetic construct
  misc_feature 1..19: note = Artificial sequence related to HLA knockouts in cell therapy
  source 1..19: mol_type = other DNA
tgggccctgagcttctacc

SEQ ID NO: 18601 - DNA, 19 bp, synthetic construct
  misc_feature 1..19: note = Artificial sequence related to HLA knockouts in cell therapy
  source 1..19: mol_type = other DNA
gggccctgagcttctaccc

SEQ ID NO: 18602 - DNA, 19 bp, synthetic construct
  misc_feature 1..19: note = Artificial sequence related to HLA knockouts in cell therapy
  source 1..19: mol_type = other DNA
ggccctgagcttctaccct

SEQ ID NO: 18603 - DNA, 19 bp, synthetic construct
  misc_feature 1..19: note = Artificial sequence related to HLA knockouts in cell therapy
  source 1..19: mol_type = other DNA
gccctgagcttctaccctg

SEQ ID NO: 18604 - DNA, 19 bp, synthetic construct
  misc_feature 1..19: note = Artificial sequence related to HLA knockouts in cell therapy
  source 1..19: mol_type = other DNA
ccctgagcttctaccctgc

SEQ ID NO: 18605 - DNA, 19 bp, synthetic construct
  misc_feature 1..19: note = Artificial sequence related to HLA knockouts in cell therapy
  source 1..19: mol_type = other DNA
cctgagcttctaccctgcg

SEQ ID NO: 18606 - DNA, 19 bp, synthetic construct
  misc_feature 1..19: note = Artificial sequence related to HLA knockouts in cell therapy
  source 1..19: mol_type = other DNA
ctgagcttctaccctgcgg

SEQ ID NO: 18607 - DNA, 19 bp, synthetic construct
  misc_feature 1..19: note = Artificial sequence related to HLA knockouts in cell therapy
  source 1..19: mol_type = other DNA
gagcttctaccctgcggag

SEQ ID NO: 18608 - DNA, 19 bp, synthetic construct
  misc_feature 1..19: note = Artificial sequence related to HLA knockouts in cell therapy
  source 1..19: mol_type = other DNA
ccctgcggagatcacactg

SEQ ID NO: 18609 - DNA, 19 bp, synthetic construct
  misc_feature 1..19: note = Artificial sequence related to HLA knockouts in cell therapy
  source 1..19: mol_type = other DNA
tcacactgacctggcagcg

SEQ ID NO: 18610 - DNA, 19 bp, synthetic construct
  misc_feature 1..19: note = Artificial sequence related to HLA knockouts in cell therapy
  source 1..19: mol_type = other DNA
cacactgacctggcagcgg

SEQ ID NO: 18611 - DNA, 19 bp, synthetic construct
  misc_feature 1..19: note = Artificial sequence related to HLA knockouts in cell therapy
  source 1..19: mol_type = other DNA
acactgacctggcagcggg

SEQ ID NO: 18612 - DNA, 19 bp, synthetic construct
  misc_feature 1..19: note = Artificial sequence related to HLA knockouts in cell therapy
  source 1..19: mol_type = other DNA
cactgacctggcagcggga

SEQ ID NO: 18613 - DNA, 19 bp, synthetic construct
  misc_feature 1..19: note = Artificial sequence related to HLA knockouts in cell therapy
  source 1..19: mol_type = other DNA
actgacctggcagcgggat

SEQ ID NO: 18614 - DNA, 19 bp, synthetic construct
  misc_feature 1..19: note = Artificial sequence related to HLA knockouts in cell therapy
  source 1..19: mol_type = other DNA
ctgacctggcagcgggatg

SEQ ID NO: 18615 - DNA, 19 bp, synthetic construct
  misc_feature 1..19: note = Artificial sequence related to HLA knockouts in cell therapy
  source 1..19: mol_type = other DNA
tgacctggcagcgggatgg

SEQ ID NO: 18616 - DNA, 19 bp, synthetic construct
  misc_feature 1..19: note = Artificial sequence related to HLA knockouts in cell therapy
  source 1..19: mol_type = other DNA
gacctggcagcgggatggg

SEQ ID NO: 18617 - DNA, 19 bp, synthetic construct
  misc_feature 1..19: note = Artificial sequence related to HLA knockouts in cell therapy
  source 1..19: mol_type = other DNA
acctggcagcgggatgggg

SEQ ID NO: 18618 - DNA, 19 bp, synthetic construct
  misc_feature 1..19: note = Artificial sequence related to HLA knockouts in cell therapy
  source 1..19: mol_type = other DNA
cctggcagcgggatgggga

SEQ ID NO: 18619 - DNA, 19 bp, synthetic construct
  misc_feature 1..19: note = Artificial sequence related to HLA knockouts in cell therapy
  source 1..19: mol_type = other DNA
ctggcagcgggatggggag

SEQ ID NO: 18620 - DNA, 19 bp, synthetic construct
  misc_feature 1..19: note = Artificial sequence related to HLA knockouts in cell therapy
  source 1..19: mol_type = other DNA
tggcagcgggatggggagg

SEQ ID NO: 18621 - DNA, 19 bp, synthetic construct
  misc_feature 1..19: note = Artificial sequence related to HLA knockouts in cell therapy
  source 1..19: mol_type = other DNA
ggcagcgggatggggagga

SEQ ID NO: 18622 - DNA, 19 bp, synthetic construct
  misc_feature 1..19: note = Artificial sequence related to HLA knockouts in cell therapy
  source 1..19: mol_type = other DNA
gcagcgggatggggaggac

SEQ ID NO: 18623 - DNA, 19 bp, synthetic construct
  misc_feature 1..19: note = Artificial sequence related to HLA knockouts in cell therapy
  source 1..19: mol_type = other DNA
cagcgggatggggaggacc

SEQ ID NO: 18624 - DNA, 19 bp, synthetic construct
  misc_feature 1..19: note = Artificial sequence related to HLA knockouts in cell therapy
  source 1..19: mol_type = other DNA
agcgggatggggaggacca

SEQ ID NO: 18625 - DNA, 19 bp, synthetic construct
  misc_feature 1..19: note = Artificial sequence related to HLA knockouts in cell therapy
  source 1..19: mol_type = other DNA
gcgggatggggaggaccag

SEQ ID NO: 18626 - DNA, 19 bp, synthetic construct
  misc_feature 1..19: note = Artificial sequence related to HLA knockouts in cell therapy
  source 1..19: mol_type = other DNA
cgggatggggaggaccaga

SEQ ID NO: 18627 - DNA, 19 bp, synthetic construct
  misc_feature 1..19: note = Artificial sequence related to HLA knockouts in cell therapy
  source 1..19: mol_type = other DNA
gggatggggaggaccagac

SEQ ID NO: 18628 - DNA, 19 bp, synthetic construct
  misc_feature 1..19: note = Artificial sequence related to HLA knockouts in cell therapy
  source 1..19: mol_type = other DNA
ggatggggaggaccagacc

SEQ ID NO: 18629 - DNA, 19 bp, synthetic construct
  misc_feature 1..19: note = Artificial sequence related to HLA knockouts in cell therapy
  source 1..19: mol_type = other DNA
gatggggaggaccagaccc

SEQ ID NO: 18630 - DNA, 19 bp, synthetic construct
  misc_feature 1..19: note = Artificial sequence related to HLA knockouts in cell therapy
  source 1..19: mol_type = other DNA
atggggaggaccagaccca

SEQ ID NO: 18631 - DNA, 19 bp, synthetic construct
  misc_feature 1..19: note = Artificial sequence related to HLA knockouts in cell therapy
  source 1..19: mol_type = other DNA
tggggaggaccagacccag

SEQ ID NO: 18632 - DNA, 19 bp, synthetic construct
  misc_feature 1..19: note = Artificial sequence related to HLA knockouts in cell therapy
  source 1..19: mol_type = other DNA
ggggaggaccagacccagg

SEQ ID NO: 18633 - DNA, 19 bp, synthetic construct
  misc_feature 1..19: note = Artificial sequence related to HLA knockouts in cell therapy
  source 1..19: mol_type = other DNA
gggaggaccagacccagga

SEQ ID NO: 18634 - DNA, 19 bp, synthetic construct
  misc_feature 1..19: note = Artificial sequence related to HLA knockouts in cell therapy
  source 1..19: mol_type = other DNA
ggaggaccagacccaggac

SEQ ID NO: 18635 - DNA, 19 bp, synthetic construct
  misc_feature 1..19: note = Artificial sequence related to HLA knockouts in cell therapy
  source 1..19: mol_type = other DNA
gaggaccagacccaggaca

SEQ ID NO: 18636 - DNA, 19 bp, synthetic construct
  misc_feature 1..19: note = Artificial sequence related to HLA knockouts in cell therapy
  source 1..19: mol_type = other DNA
aggaccagacccaggacac

SEQ ID NO: 18637 - DNA, 19 bp, synthetic construct
  misc_feature 1..19: note = Artificial sequence related to HLA knockouts in cell therapy
  source 1..19: mol_type = other DNA
ggaccagacccaggacacg

SEQ ID NO: 18638 - DNA, 19 bp, synthetic construct
  misc_feature 1..19: note = Artificial sequence related to HLA knockouts in cell therapy
  source 1..19: mol_type = other DNA
gaccagacccaggacacgg

SEQ ID NO: 18639 - DNA, 19 bp, synthetic construct
  misc_feature 1..19: note = Artificial sequence related to HLA knockouts in cell therapy
  source 1..19: mol_type = other DNA
accagacccaggacacgga

SEQ ID NO: 18640 - DNA, 19 bp, synthetic construct
  misc_feature 1..19: note = Artificial sequence related to HLA knockouts in cell therapy
  source 1..19: mol_type = other DNA
ccagacccaggacacggag

SEQ ID NO: 18641 - DNA, 19 bp, synthetic construct
  misc_feature 1..19: note = Artificial sequence related to HLA knockouts in cell therapy
  source 1..19: mol_type = other DNA
cagacccaggacacggagc

SEQ ID NO: 18642 - DNA, 19 bp, synthetic construct
  misc_feature 1..19: note = Artificial sequence related to HLA knockouts in cell therapy
  source 1..19: mol_type = other DNA
agacccaggacacggagct

SEQ ID NO: 18643 - DNA, 19 bp, synthetic construct
  misc_feature 1..19: note = Artificial sequence related to HLA knockouts in cell therapy
  source 1..19: mol_type = other DNA
gacccaggacacggagctc

SEQ ID NO: 18644 - DNA, 19 bp, synthetic construct
  misc_feature 1..19: note = Artificial sequence related to HLA knockouts in cell therapy
  source 1..19: mol_type = other DNA
acccaggacacggagctcg

SEQ ID NO: 18645 - DNA, 19 bp, synthetic construct
  misc_feature 1..19: note = Artificial sequence related to HLA knockouts in cell therapy
  source 1..19: mol_type = other DNA
cccaggacacggagctcgt

SEQ ID NO: 18646 - DNA, 19 bp, synthetic construct
  misc_feature 1..19: note = Artificial sequence related to HLA knockouts in cell therapy
  source 1..19: mol_type = other DNA
ccaggacacggagctcgtg

SEQ ID NO: 18647 - DNA, 19 bp, synthetic construct
  misc_feature 1..19: note = Artificial sequence related to HLA knockouts in cell therapy
  source 1..19: mol_type = other DNA
caggacacggagctcgtgg

SEQ ID NO: 18648 - DNA, 19 bp, synthetic construct
  misc_feature 1..19: note = Artificial sequence related to HLA knockouts in cell therapy
  source 1..19: mol_type = other DNA
aggacacggagctcgtgga

SEQ ID NO: 18649 - DNA, 19 bp, synthetic construct
  misc_feature 1..19: note = Artificial sequence related to HLA knockouts in cell therapy
  source 1..19: mol_type = other DNA
ggacacggagctcgtggag

SEQ ID NO: 18650 - DNA, 19 bp, synthetic construct
  misc_feature 1..19: note = Artificial sequence related to HLA knockouts in cell therapy
  source 1..19: mol_type = other DNA
gacacggagctcgtggaga

SEQ ID NO: 18651 - DNA, 19 bp, synthetic construct
  misc_feature 1..19: note = Artificial sequence related to HLA knockouts in cell therapy
  source 1..19: mol_type = other DNA
acacggagctcgtggagac

SEQ ID NO: 18652 - DNA, 19 bp, synthetic construct
  misc_feature 1..19: note = Artificial sequence related to HLA knockouts in cell therapy
  source 1..19: mol_type = other DNA
cacggagctcgtggagacc

SEQ ID NO: 18653 - DNA, 19 bp, synthetic construct
  misc_feature 1..19: note = Artificial sequence related to HLA knockouts in cell therapy
  source 1..19: mol_type = other DNA
acggagctcgtggagacca

SEQ ID NO: 18654 - DNA, 19 bp, synthetic construct
  misc_feature 1..19: note = Artificial sequence related to HLA knockouts in cell therapy
  source 1..19: mol_type = other DNA
cggagctcgtggagaccag

SEQ ID NO: 18655 - DNA, 19 bp, synthetic construct
  misc_feature 1..19: note = Artificial sequence related to HLA knockouts in cell therapy
  source 1..19: mol_type = other DNA
ggagctcgtggagaccagg

SEQ ID NO: 18656 - DNA, 19 bp, synthetic construct
  misc_feature 1..19: note = Artificial sequence related to HLA knockouts in cell therapy
  source 1..19: mol_type = other DNA
gagctcgtggagaccaggc

SEQ ID NO: 18657 - DNA, 19 bp, synthetic construct
  misc_feature 1..19: note = Artificial sequence related to HLA knockouts in cell therapy
  source 1..19: mol_type = other DNA
agctcgtggagaccaggcc

SEQ ID NO: 18658 - DNA, 19 bp, synthetic construct
  misc_feature 1..19: note = Artificial sequence related to HLA knockouts in cell therapy
  source 1..19: mol_type = other DNA
gctcgtggagaccaggcct

SEQ ID NO: 18659 - DNA, 19 bp, synthetic construct
  misc_feature 1..19: note = Artificial sequence related to HLA knockouts in cell therapy
  source 1..19: mol_type = other DNA
ctcgtggagaccaggcctg

SEQ ID NO: 18660 - DNA, 19 bp, synthetic construct
  misc_feature 1..19: note = Artificial sequence related to HLA knockouts in cell therapy
  source 1..19: mol_type = other DNA
tcgtggagaccaggcctgc

SEQ ID NO: 18661 - DNA, 19 bp, synthetic construct
  misc_feature 1..19: note = Artificial sequence related to HLA knockouts in cell therapy
  source 1..19: mol_type = other DNA
cgtggagaccaggcctgca

SEQ ID NO: 18662 - DNA, 19 bp, synthetic construct
  misc_feature 1..19: note = Artificial sequence related to HLA knockouts in cell therapy
  source 1..19: mol_type = other DNA
gtggagaccaggcctgcag

SEQ ID NO: 18663 - DNA, 19 bp, synthetic construct
  misc_feature 1..19: note = Artificial sequence related to HLA knockouts in cell therapy
  source 1..19: mol_type = other DNA
tggagaccaggcctgcagg

SEQ ID NO: 18664 - DNA, 19 bp, synthetic construct
  misc_feature 1..19: note = Artificial sequence related to HLA knockouts in cell therapy
  source 1..19: mol_type = other DNA
ggagaccaggcctgcaggg

SEQ ID NO: 18665 - DNA, 19 bp, synthetic construct
  misc_feature 1..19: note = Artificial sequence related to HLA knockouts in cell therapy
  source 1..19: mol_type = other DNA
gagaccaggcctgcagggg

SEQ ID NO: 18666 - DNA, 19 bp, synthetic construct
  misc_feature 1..19: note = Artificial sequence related to HLA knockouts in cell therapy
  source 1..19: mol_type = other DNA
agaccaggcctgcagggga

SEQ ID NO: 18667 - DNA, 19 bp, synthetic construct
  misc_feature 1..19: note = Artificial sequence related to HLA knockouts in cell therapy
  source 1..19: mol_type = other DNA
gaccaggcctgcaggggat

SEQ ID NO: 18668 - DNA, 19 bp, synthetic construct
  misc_feature 1..19: note = Artificial sequence related to HLA knockouts in cell therapy
  source 1..19: mol_type = other DNA
accaggcctgcaggggatg

SEQ ID NO: 18669 - DNA, 19 bp, synthetic construct
  misc_feature 1..19: note = Artificial sequence related to HLA knockouts in cell therapy
  source 1..19: mol_type = other DNA
ccaggcctgcaggggatgg

SEQ ID NO: 18670 - DNA, 19 bp, synthetic construct
  misc_feature 1..19: note = Artificial sequence related to HLA knockouts in cell therapy
  source 1..19: mol_type = other DNA
caggcctgcaggggatgga

SEQ ID NO: 18671 - DNA, 19 bp, synthetic construct
  misc_feature 1..19: note = Artificial sequence related to HLA knockouts in cell therapy
  source 1..19: mol_type = other DNA
aggcctgcaggggatggaa

SEQ ID NO: 18672 - DNA, 19 bp, synthetic construct
  misc_feature 1..19: note = Artificial sequence related to HLA knockouts in cell therapy
  source 1..19: mol_type = other DNA
ggcctgcaggggatggaac

SEQ ID NO: 18673 - DNA, 19 bp, synthetic construct
  misc_feature 1..19: note = Artificial sequence related to HLA knockouts in cell therapy
  source 1..19: mol_type = other DNA
gcctgcaggggatggaacc

SEQ ID NO: 18674 - DNA, 19 bp, synthetic construct
  misc_feature 1..19: note = Artificial sequence related to HLA knockouts in cell therapy
  source 1..19: mol_type = other DNA
cctgcaggggatggaacct

SEQ ID NO: 18675 - DNA, 19 bp, synthetic construct
  misc_feature 1..19: note = Artificial sequence related to HLA knockouts in cell therapy
  source 1..19: mol_type = other DNA
gcaggggatggaaccttcc

SEQ ID NO: 18676 - DNA, 19 bp, synthetic construct
  misc_feature 1..19: note = Artificial sequence related to HLA knockouts in cell therapy
  source 1..19: mol_type = other DNA
accttccagaagtgggcgg

SEQ ID NO: 18677 - DNA, 19 bp, synthetic construct
  misc_feature 1..19: note = Artificial sequence related to HLA knockouts in cell therapy
  source 1..19: mol_type = other DNA
ccttccagaagtgggcggc

SEQ ID NO: 18678 - DNA, 19 bp, synthetic construct
  misc_feature 1..19: note = Artificial sequence related to HLA knockouts in cell therapy
  source 1..19: mol_type = other DNA
cttccagaagtgggcggct

SEQ ID NO: 18679 - DNA, 19 bp, synthetic construct
  misc_feature 1..19: note = Artificial sequence related to HLA knockouts in cell therapy
  source 1..19: mol_type = other DNA
ttccagaagtgggcggctg

SEQ ID NO: 18680 - DNA, 19 bp, synthetic construct
  misc_feature 1..19: note = Artificial sequence related to HLA knockouts in cell therapy
  source 1..19: mol_type = other DNA
tccagaagtgggcggctgt

SEQ ID NO: 18681 - DNA, 19 bp, synthetic construct
  misc_feature 1..19: note = Artificial sequence related to HLA knockouts in cell therapy
  source 1..19: mol_type = other DNA
ccagaagtgggcggctgtg

SEQ ID NO: 18682 - DNA, 19 bp, synthetic construct
  misc_feature 1..19: note = Artificial sequence related to HLA knockouts in cell therapy
  source 1..19: mol_type = other DNA
cagaagtgggcggctgtgg

SEQ ID NO: 18683 - DNA, 19 bp, synthetic construct
  misc_feature 1..19: note = Artificial sequence related to HLA knockouts in cell therapy
  source 1..19: mol_type = other DNA
agaagtgggcggctgtggt

SEQ ID NO: 18684 - DNA, 19 bp, synthetic construct
  misc_feature 1..19: note = Artificial sequence related to HLA knockouts in cell therapy
  source 1..19: mol_type = other DNA
gaagtgggcggctgtggtg

SEQ ID NO: 18685 - DNA, 19 bp, synthetic construct
  misc_feature 1..19: note = Artificial sequence related to HLA knockouts in cell therapy
  source 1..19: mol_type = other DNA
aagtgggcggctgtggtgg

SEQ ID NO: 18686 - DNA, 19 bp, synthetic construct
  misc_feature 1..19: note = Artificial sequence related to HLA knockouts in cell therapy
  source 1..19: mol_type = other DNA
agtgggcggctgtggtggt

SEQ ID NO: 18687 - DNA, 19 bp, synthetic construct
  misc_feature 1..19: note = Artificial sequence related to HLA knockouts in cell therapy
  source 1..19: mol_type = other DNA
gtgggcggctgtggtggtg

SEQ ID NO: 18688 - DNA, 19 bp, synthetic construct
  misc_feature 1..19: note = Artificial sequence related to HLA knockouts in cell therapy
  source 1..19: mol_type = other DNA
tgggcggctgtggtggtgc

SEQ ID NO: 18689 - DNA, 19 bp, synthetic construct
  misc_feature 1..19: note = Artificial sequence related to HLA knockouts in cell therapy
  source 1..19: mol_type = other DNA
gggcggctgtggtggtgcc

SEQ ID NO: 18690 - DNA, 19 bp, synthetic construct
  misc_feature 1..19: note = Artificial sequence related to HLA knockouts in cell therapy
  source 1..19: mol_type = other DNA
ggcggctgtggtggtgcct

SEQ ID NO: 18691 - DNA, 19 bp, synthetic construct
  misc_feature 1..19: note = Artificial sequence related to HLA knockouts in cell therapy
  source 1..19: mol_type = other DNA
gcggctgtggtggtgcctt

SEQ ID NO: 18692 - DNA, 19 bp, synthetic construct
  misc_feature 1..19: note = Artificial sequence related to HLA knockouts in cell therapy
  source 1..19: mol_type = other DNA
cggctgtggtggtgccttc

SEQ ID NO: 18693 - DNA, 19 bp, synthetic construct
  misc_feature 1..19: note = Artificial sequence related to HLA knockouts in cell therapy
  source 1..19: mol_type = other DNA
ggctgtggtggtgccttct

SEQ ID NO: 18694 - DNA, 19 bp, synthetic construct
  misc_feature 1..19: note = Artificial sequence related to HLA knockouts in cell therapy
  source 1..19: mol_type = other DNA
gctgtggtggtgccttctg

SEQ ID NO: 18695 - DNA, 19 bp, synthetic construct
  misc_feature 1..19: note = Artificial sequence related to HLA knockouts in cell therapy
  source 1..19: mol_type = other DNA
ctgtggtggtgccttctgg

SEQ ID NO: 18696 - DNA, 19 bp, synthetic construct
  misc_feature 1..19: note = Artificial sequence related to HLA knockouts in cell therapy
  source 1..19: mol_type = other DNA
gtggtggtgccttctggac

SEQ ID NO: 18697 - DNA, 19 bp, synthetic construct
  misc_feature 1..19: note = Artificial sequence related to HLA knockouts in cell therapy
  source 1..19: mol_type = other DNA
ggtggtgccttctggacag

SEQ ID NO: 18698 - DNA, 19 bp, synthetic construct
  misc_feature 1..19: note = Artificial sequence related to HLA knockouts in cell therapy
  source 1..19: mol_type = other DNA
gtggtgccttctggacagg

SEQ ID NO: 18699 - DNA, 19 bp, synthetic construct
  misc_feature 1..19: note = Artificial sequence related to HLA knockouts in cell therapy
  source 1..19: mol_type = other DNA
ggtgccttctggacaggag

SEQ ID NO: 18700 - DNA, 19 bp, synthetic construct
  misc_feature 1..19: note = Artificial sequence related to HLA knockouts in cell therapy
  source 1..19: mol_type = other DNA
gtgccttctggacaggagc

SEQ ID NO: 18701 - DNA, 19 bp, synthetic construct
  misc_feature 1..19: note = Artificial sequence related to HLA knockouts in cell therapy
  source 1..19: mol_type = other DNA
gccttctggacaggagcag

SEQ ID NO: 18702 - DNA, 19 bp, synthetic construct
  misc_feature 1..19: note = Artificial sequence related to HLA knockouts in cell therapy
  source 1..19: mol_type = other DNA
gccatgtgcagcatgaggg

SEQ ID NO: 18703 - DNA, 19 bp, synthetic construct
  misc_feature 1..19: note = Artificial sequence related to HLA knockouts in cell therapy
  source 1..19: mol_type = other DNA
gcagcatgagggtttgccc

SEQ ID NO: 18704 - DNA, 19 bp, synthetic construct
  misc_feature 1..19: note = Artificial sequence related to HLA knockouts in cell therapy
  source 1..19: mol_type = other DNA
tgagggtttgcccaagccc

SEQ ID NO: 18705 - DNA, 19 bp, synthetic construct
  misc_feature 1..19: note = Artificial sequence related to HLA knockouts in cell therapy
  source 1..19: mol_type = other DNA
gagggtttgcccaagcccc

SEQ ID NO: 18706 - DNA, 19 bp, synthetic construct
  misc_feature 1..19: note = Artificial sequence related to HLA knockouts in cell therapy
  source 1..19: mol_type = other DNA
agggtttgcccaagcccct

SEQ ID NO: 18707 - DNA, 19 bp, synthetic construct
  misc_feature 1..19: note = Artificial sequence related to HLA knockouts in cell therapy
  source 1..19: mol_type = other DNA
gggtttgcccaagcccctc

SEQ ID NO: 18708 - DNA, 19 bp, synthetic construct
  misc_feature 1..19: note = Artificial sequence related to HLA knockouts in cell therapy
  source 1..19: mol_type = other DNA
ggtttgcccaagcccctca

SEQ ID NO: 18709 - DNA, 19 bp, synthetic construct
  misc_feature 1..19: note = Artificial sequence related to HLA knockouts in cell therapy
  source 1..19: mol_type = other DNA
gtttgcccaagcccctcac

SEQ ID NO: 18710 - DNA, 19 bp, synthetic construct
  misc_feature 1..19: note = Artificial sequence related to HLA knockouts in cell therapy
  source 1..19: mol_type = other DNA
tttgcccaagcccctcacc

SEQ ID NO: 18711 - DNA, 19 bp, synthetic construct
  misc_feature 1..19: note = Artificial sequence related to HLA knockouts in cell therapy
  source 1..19: mol_type = other DNA
ttgcccaagcccctcaccc

SEQ ID NO: 18712 - DNA, 19 bp, synthetic construct
  misc_feature 1..19: note = Artificial sequence related to HLA knockouts in cell therapy
  source 1..19: mol_type = other DNA
tgcccaagcccctcaccct

SEQ ID NO: 18713 - DNA, 19 bp, synthetic construct
  misc_feature 1..19: note = Artificial sequence related to HLA knockouts in cell therapy
  source 1..19: mol_type = other DNA
gcccaagcccctcaccctg

SEQ ID NO: 18714 - DNA, 19 bp, synthetic construct
  misc_feature 1..19: note = Artificial sequence related to HLA knockouts in cell therapy
  source 1..19: mol_type = other DNA
cccaagcccctcaccctga

SEQ ID NO: 18715 - DNA, 19 bp, synthetic construct
  misc_feature 1..19: note = Artificial sequence related to HLA knockouts in cell therapy
  source 1..19: mol_type = other DNA
ccaagcccctcaccctgag

SEQ ID NO: 18716 - DNA, 19 bp, synthetic construct
  misc_feature 1..19: note = Artificial sequence related to HLA knockouts in cell therapy
  source 1..19: mol_type = other DNA
caagcccctcaccctgaga

SEQ ID NO: 18717 - DNA, 19 bp, synthetic construct
  misc_feature 1..19: note = Artificial sequence related to HLA knockouts in cell therapy
  source 1..19: mol_type = other DNA
agcccctcaccctgagatg

SEQ ID NO: 18718 - DNA, 19 bp, synthetic construct
  misc_feature 1..19: note = Artificial sequence related to HLA knockouts in cell therapy
  source 1..19: mol_type = other DNA
gcccctcaccctgagatgg

SEQ ID NO: 18719 - DNA, 19 bp, synthetic construct
  misc_feature 1..19: note = Artificial sequence related to HLA knockouts in cell therapy
  source 1..19: mol_type = other DNA
cccctcaccctgagatggg

SEQ ID NO: 18720 - DNA, 19 bp, synthetic construct
  misc_feature 1..19: note = Artificial sequence related to HLA knockouts in cell therapy
  source 1..19: mol_type = other DNA
ccctcaccctgagatggga

SEQ ID NO: 18721 - DNA, 19 bp, synthetic construct
  misc_feature 1..19: note = Artificial sequence related to HLA knockouts in cell therapy
  source 1..19: mol_type = other DNA
cctcaccctgagatgggag

SEQ ID NO: 18722 - DNA, 19 bp, synthetic construct
  misc_feature 1..19: note = Artificial sequence related to HLA knockouts in cell therapy
  source 1..19: mol_type = other DNA
ctcaccctgagatgggagc

SEQ ID NO: 18723 - DNA, 19 bp, synthetic construct
  misc_feature 1..19: note = Artificial sequence related to HLA knockouts in cell therapy
  source 1..19: mol_type = other DNA
tcaccctgagatgggagcc

SEQ ID NO: 18724 - DNA, 19 bp, synthetic construct
  misc_feature 1..19: note = Artificial sequence related to HLA knockouts in cell therapy
  source 1..19: mol_type = other DNA
caccctgagatgggagccg

SEQ ID NO: 18725 - DNA, 19 bp, synthetic construct
  misc_feature 1..19: note = Artificial sequence related to HLA knockouts in cell therapy
  source 1..19: mol_type = other DNA
accctgagatgggagccgt

SEQ ID NO: 18726 - DNA, 19 bp, synthetic construct
  misc_feature 1..19: note = Artificial sequence related to HLA knockouts in cell therapy
  source 1..19: mol_type = other DNA
ccctgagatgggagccgtc

SEQ ID NO: 18727 - DNA, 19 bp, synthetic construct
  misc_feature 1..19: note = Artificial sequence related to HLA knockouts in cell therapy
  source 1..19: mol_type = other DNA
cctgagatgggagccgtct

SEQ ID NO: 18728 - DNA, 19 bp, synthetic construct
  misc_feature 1..19: note = Artificial sequence related to HLA knockouts in cell therapy
  source 1..19: mol_type = other DNA
gagatgggagccgtcttcc

SEQ ID NO: 18729 - DNA, 19 bp, synthetic construct
  misc_feature 1..19: note = Artificial sequence related to HLA knockouts in cell therapy
  source 1..19: mol_type = other DNA
agatgggagccgtcttccc

SEQ ID NO: 18730 - DNA, 19 bp, synthetic construct
  misc_feature 1..19: note = Artificial sequence related to HLA knockouts in cell therapy
  source 1..19: mol_type = other DNA
gatgggagccgtcttccca

SEQ ID NO: 18731 - DNA, 19 bp, synthetic construct
  misc_feature 1..19: note = Artificial sequence related to HLA knockouts in cell therapy
  source 1..19: mol_type = other DNA
atgggagccgtcttcccag

SEQ ID NO: 18732 - DNA, 19 bp, synthetic construct
  misc_feature 1..19: note = Artificial sequence related to HLA knockouts in cell therapy
  source 1..19: mol_type = other DNA
tgggagccgtcttcccagc

SEQ ID NO: 18733 - DNA, 19 bp, synthetic construct
  misc_feature 1..19: note = Artificial sequence related to HLA knockouts in cell therapy
  source 1..19: mol_type = other DNA
gggagccgtcttcccagcc

SEQ ID NO: 18734 - DNA, 19 bp, synthetic construct
  misc_feature 1..19: note = Artificial sequence related to HLA knockouts in cell therapy
  source 1..19: mol_type = other DNA
ggagccgtcttcccagccc

SEQ ID NO: 18735 - DNA, 19 bp, synthetic construct
  misc_feature 1..19: note = Artificial sequence related to HLA knockouts in cell therapy
  source 1..19: mol_type = other DNA
gagccgtcttcccagccca

SEQ ID NO: 18736 - DNA, 19 bp, synthetic construct
  misc_feature 1..19: note = Artificial sequence related to HLA knockouts in cell therapy
  source 1..19: mol_type = other DNA
agccgtcttcccagcccac

SEQ ID NO: 18737 - DNA, 19 bp, synthetic construct
  misc_feature 1..19: note = Artificial sequence related to HLA knockouts in cell therapy
  source 1..19: mol_type = other DNA
gccgtcttcccagcccacc

SEQ ID NO: 18738 - DNA, 19 bp, synthetic construct
  misc_feature 1..19: note = Artificial sequence related to HLA knockouts in cell therapy
  source 1..19: mol_type = other DNA
ccgtcttcccagcccacca

SEQ ID NO: 18739 - DNA, 19 bp, synthetic construct
  misc_feature 1..19: note = Artificial sequence related to HLA knockouts in cell therapy
  source 1..19: mol_type = other DNA
cgtcttcccagcccaccat

SEQ ID NO: 18740 - DNA, 19 bp, synthetic construct
  misc_feature 1..19: note = Artificial sequence related to HLA knockouts in cell therapy
  source 1..19: mol_type = other DNA
gtcttcccagcccaccatc

SEQ ID NO: 18741 - DNA, 19 bp, synthetic construct
  misc_feature 1..19: note = Artificial sequence related to HLA knockouts in cell therapy
  source 1..19: mol_type = other DNA
tcttcccagcccaccatcc

SEQ ID NO: 18742 - DNA, 19 bp, synthetic construct
  misc_feature 1..19: note = Artificial sequence related to HLA knockouts in cell therapy
  source 1..19: mol_type = other DNA
cttcccagcccaccatccc

SEQ ID NO: 18743 - DNA, 19 bp, synthetic construct
  misc_feature 1..19: note = Artificial sequence related to HLA knockouts in cell therapy
  source 1..19: mol_type = other DNA
ttcccagcccaccatcccc

SEQ ID NO: 18744 - DNA, 19 bp, synthetic construct
  misc_feature 1..19: note = Artificial sequence related to HLA knockouts in cell therapy
  source 1..19: mol_type = other DNA
tcccagcccaccatcccca

SEQ ID NO: 18745 - DNA, 19 bp, synthetic construct
  misc_feature 1..19: note = Artificial sequence related to HLA knockouts in cell therapy
  source 1..19: mol_type = other DNA
cccagcccaccatccccat

SEQ ID NO: 18746 - DNA, 19 bp, synthetic construct
  misc_feature 1..19: note = Artificial sequence related to HLA knockouts in cell therapy
  source 1..19: mol_type = other DNA
ccagcccaccatccccatc

SEQ ID NO: 18747 - DNA, 19 bp, synthetic construct
  misc_feature 1..19: note = Artificial sequence related to HLA knockouts in cell therapy
  source 1..19: mol_type = other DNA
cagcccaccatccccatcg

SEQ ID NO: 18748 - DNA, 19 bp, synthetic construct
  misc_feature 1..19: note = Artificial sequence related to HLA knockouts in cell therapy
  source 1..19: mol_type = other DNA
agcccaccatccccatcgt

SEQ ID NO: 18749 - DNA, 19 bp, synthetic construct
  misc_feature 1..19: note = Artificial sequence related to HLA knockouts in cell therapy
  source 1..19: mol_type = other DNA
gcccaccatccccatcgtg

SEQ ID NO: 18750 - DNA, 19 bp, synthetic construct
  misc_feature 1..19: note = Artificial sequence related to HLA knockouts in cell therapy
  source 1..19: mol_type = other DNA
cccaccatccccatcgtgg

SEQ ID NO: 18751 - DNA, 19 bp, synthetic construct
  misc_feature 1..19: note = Artificial sequence related to HLA knockouts in cell therapy
  source 1..19: mol_type = other DNA
ccaccatccccatcgtggg

SEQ ID NO: 18752 - DNA, 19 bp, synthetic construct
  misc_feature 1..19: note = Artificial sequence related to HLA knockouts in cell therapy
  source 1..19: mol_type = other DNA
caccatccccatcgtgggc

SEQ ID NO: 18753 - DNA, 19 bp, synthetic construct
  misc_feature 1..19: note = Artificial sequence related to HLA knockouts in cell therapy
  source 1..19: mol_type = other DNA
accatccccatcgtgggca

SEQ ID NO: 18754 - DNA, 19 bp, synthetic construct
  misc_feature 1..19: note = Artificial sequence related to HLA knockouts in cell therapy
  source 1..19: mol_type = other DNA
ccatccccatcgtgggcat

SEQ ID NO: 18755 - DNA, 19 bp, synthetic construct
  misc_feature 1..19: note = Artificial sequence related to HLA knockouts in cell therapy
  source 1..19: mol_type = other DNA
catccccatcgtgggcatc

SEQ ID NO: 18756 - DNA, 19 bp, synthetic construct
  misc_feature 1..19: note = Artificial sequence related to HLA knockouts in cell therapy
  source 1..19: mol_type = other DNA
cgtgggcatcattgctggc

SEQ ID NO: 18757 - DNA, 19 bp, synthetic construct
  misc_feature 1..19: note = Artificial sequence related to HLA knockouts in cell therapy
  source 1..19: mol_type = other DNA
gtgggcatcattgctggcc

SEQ ID NO: 18758 - DNA, 19 bp, synthetic construct
  misc_feature 1..19: note = Artificial sequence related to HLA knockouts in cell therapy
  source 1..19: mol_type = other DNA
gggcatcattgctggcctg

SEQ ID NO: 18759 - DNA, 19 bp, synthetic construct
  misc_feature 1..19: note = Artificial sequence related to HLA knockouts in cell therapy
  source 1..19: mol_type = other DNA
ggcatcattgctggcctgg

SEQ ID NO: 18760 - DNA, 19 bp, synthetic construct
  misc_feature 1..19: note = Artificial sequence related to HLA knockouts in cell therapy
  source 1..19: mol_type = other DNA
tcactggagctgtggtcgc

SEQ ID NO: 18761 - DNA, 19 bp, synthetic construct
  misc_feature 1..19: note = Artificial sequence related to HLA knockouts in cell therapy
  source 1..19: mol_type = other DNA
cactggagctgtggtcgct

SEQ ID NO: 18762 - DNA, 19 bp, synthetic construct
  misc_feature 1..19: note = Artificial sequence related to HLA knockouts in cell therapy
  source 1..19: mol_type = other DNA
actggagctgtggtcgctg

SEQ ID NO: 18763 - DNA, 19 bp, synthetic construct
  misc_feature 1..19: note = Artificial sequence related to HLA knockouts in cell therapy
  source 1..19: mol_type = other DNA
ctggagctgtggtcgctgc

SEQ ID NO: 18764 - DNA, 19 bp, synthetic construct
  misc_feature 1..19: note = Artificial sequence related to HLA knockouts in cell therapy
  source 1..19: mol_type = other DNA
tggagctgtggtcgctgct

SEQ ID NO: 18765 - DNA, 19 bp, synthetic construct
  misc_feature 1..19: note = Artificial sequence related to HLA knockouts in cell therapy
  source 1..19: mol_type = other DNA
ggagctgtggtcgctgctg

SEQ ID NO: 18766 - DNA, 19 bp, synthetic construct
  misc_feature 1..19: note = Artificial sequence related to HLA knockouts in cell therapy
  source 1..19: mol_type = other DNA
gagctgtggtcgctgctgt

SEQ ID NO: 18767 - DNA, 19 bp, synthetic construct
  misc_feature 1..19: note = Artificial sequence related to HLA knockouts in cell therapy
  source 1..19: mol_type = other DNA
agctgtggtcgctgctgtg

SEQ ID NO: 18768 - DNA, 19 bp, synthetic construct
  misc_feature 1..19: note = Artificial sequence related to HLA knockouts in cell therapy
  source 1..19: mol_type = other DNA
gctgtggtcgctgctgtga

SEQ ID NO: 18769 - DNA, 19 bp, synthetic construct
  misc_feature 1..19: note = Artificial sequence related to HLA knockouts in cell therapy
  source 1..19: mol_type = other DNA
ggtcgctgctgtgatgtgg

SEQ ID NO: 18770 - DNA, 19 bp, synthetic construct
  misc_feature 1..19: note = Artificial sequence related to HLA knockouts in cell therapy
  source 1..19: mol_type = other DNA
cgctgctgtgatgtggagg

SEQ ID NO: 18771 - DNA, 19 bp, synthetic construct
  misc_feature 1..19: note = Artificial sequence related to HLA knockouts in cell therapy
  source 1..19: mol_type = other DNA
ggagggagctactctcagg

SEQ ID NO: 18772 - DNA, 19 bp, synthetic construct
  misc_feature 1..19: note = Artificial sequence related to HLA knockouts in cell therapy
  source 1..19: mol_type = other DNA
gagggagctactctcaggc

SEQ ID NO: 18773 - DNA, 19 bp, synthetic construct
  misc_feature 1..19: note = Artificial sequence related to HLA knockouts in cell therapy
  source 1..19: mol_type = other DNA
gggagctactctcaggctg

SEQ ID NO: 18774 - DNA, 19 bp, synthetic construct
  misc_feature 1..19: note = Artificial sequence related to HLA knockouts in cell therapy
  source 1..19: mol_type = other DNA
ggagctactctcaggctgc

SEQ ID NO: 18775 - DNA, 19 bp, synthetic construct
  misc_feature 1..19: note = Artificial sequence related to HLA knockouts in cell therapy
  source 1..19: mol_type = other DNA
gcaagcagtgacagtgccc

SEQ ID NO: 18776 - DNA, 19 bp, synthetic construct
  misc_feature 1..19: note = Artificial sequence related to HLA knockouts in cell therapy
  source 1..19: mol_type = other DNA
agcagtgacagtgcccagg

SEQ ID NO: 18777 - DNA, 19 bp, synthetic construct
  misc_feature 1..19: note = Artificial sequence related to HLA knockouts in cell therapy
  source 1..19: mol_type = other DNA
gcagtgacagtgcccaggg

SEQ ID NO: 18778 - DNA, 19 bp, synthetic construct
  misc_feature 1..19: note = Artificial sequence related to HLA knockouts in cell therapy
  source 1..19: mol_type = other DNA
cagtgacagtgcccagggc

SEQ ID NO: 18779 - DNA, 19 bp, synthetic construct
  misc_feature 1..19: note = Artificial sequence related to HLA knockouts in cell therapy
  source 1..19: mol_type = other DNA
agtgacagtgcccagggct

SEQ ID NO: 18780 - DNA, 19 bp, synthetic construct
  misc_feature 1..19: note = Artificial sequence related to HLA knockouts in cell therapy
  source 1..19: mol_type = other DNA
gtgacagtgcccagggctc

SEQ ID NO: 18781 - DNA, 19 bp, synthetic construct
  misc_feature 1..19: note = Artificial sequence related to HLA knockouts in cell therapy
  source 1..19: mol_type = other DNA
tgacagtgcccagggctct

SEQ ID NO: 18782 - DNA, 19 bp, synthetic construct
  misc_feature 1..19: note = Artificial sequence related to HLA knockouts in cell therapy
  source 1..19: mol_type = other DNA
gacagtgcccagggctctg

SEQ ID NO: 18783 - DNA, 19 bp, synthetic construct
  misc_feature 1..19: note = Artificial sequence related to HLA knockouts in cell therapy
  source 1..19: mol_type = other DNA
acagtgcccagggctctga

SEQ ID NO: 18784 - DNA, 19 bp, synthetic construct
  misc_feature 1..19: note = Artificial sequence related to HLA knockouts in cell therapy
  source 1..19: mol_type = other DNA
cagtgcccagggctctgat

SEQ ID NO: 18785 - DNA, 19 bp, synthetic construct
  misc_feature 1..19: note = Artificial sequence related to HLA knockouts in cell therapy
  source 1..19: mol_type = other DNA
agtgcccagggctctgatg

SEQ ID NO: 18786 - DNA, 19 bp, synthetic construct
  misc_feature 1..19: note = Artificial sequence related to HLA knockouts in cell therapy
  source 1..19: mol_type = other DNA
gtgcccagggctctgatgt

SEQ ID NO: 18787 - DNA, 19 bp, synthetic construct
  misc_feature 1..19: note = Artificial sequence related to HLA knockouts in cell therapy
  source 1..19: mol_type = other DNA
tgcccagggctctgatgtg

SEQ ID NO: 18788 - DNA, 19 bp, synthetic construct
  misc_feature 1..19: note = Artificial sequence related to HLA knockouts in cell therapy
  source 1..19: mol_type = other DNA
gcccagggctctgatgtgt

SEQ ID NO: 18789 - DNA, 19 bp, synthetic construct
  misc_feature 1..19: note = Artificial sequence related to HLA knockouts in cell therapy
  source 1..19: mol_type = other DNA
cccagggctctgatgtgtc

SEQ ID NO: 18790 - DNA, 19 bp, synthetic construct
  misc_feature 1..19: note = Artificial sequence related to HLA knockouts in cell therapy
  source 1..19: mol_type = other DNA
gacagctgccttgtgtggg

SEQ ID NO: 18791 - DNA, 19 bp, synthetic construct
  misc_feature 1..19: note = Artificial sequence related to HLA knockouts in cell therapy
  source 1..19: mol_type = other DNA
cagctgccttgtgtgggac

SEQ ID NO: 18792 - DNA, 19 bp, synthetic construct
  misc_feature 1..19: note = Artificial sequence related to HLA knockouts in cell therapy
  source 1..19: mol_type = other DNA
gctgccttgtgtgggactg

SEQ ID NO: 18793 - DNA, 19 bp, synthetic construct
  misc_feature 1..19: note = Artificial sequence related to HLA knockouts in cell therapy
  source 1..19: mol_type = other DNA
tgtgaggaggtggggagac

SEQ ID NO: 18794 - DNA, 19 bp, synthetic construct
  misc_feature 1..19: note = Artificial sequence related to HLA knockouts in cell therapy
  source 1..19: mol_type = other DNA
gtgaggaggtggggagacc

SEQ ID NO: 18795 - DNA, 19 bp, synthetic construct
  misc_feature 1..19: note = Artificial sequence related to HLA knockouts in cell therapy
  source 1..19: mol_type = other DNA
tgaggaggtggggagacca

SEQ ID NO: 18796 - DNA, 19 bp, synthetic construct
  misc_feature 1..19: note = Artificial sequence related to HLA knockouts in cell therapy
  source 1..19: mol_type = other DNA
gaggaggtggggagaccac

SEQ ID NO: 18797 - DNA, 19 bp, synthetic construct
  misc_feature 1..19: note = Artificial sequence related to HLA knockouts in cell therapy
  source 1..19: mol_type = other DNA
aggaggtggggagaccacc

SEQ ID NO: 18798 - DNA, 19 bp, synthetic construct
  misc_feature 1..19: note = Artificial sequence related to HLA knockouts in cell therapy
  source 1..19: mol_type = other DNA
ggaggtggggagaccaccc

SEQ ID NO: 18799 - DNA, 19 bp, synthetic construct
  misc_feature 1..19: note = Artificial sequence related to HLA knockouts in cell therapy
  source 1..19: mol_type = other DNA
gaggtggggagaccacccc

SEQ ID NO: 18800 - DNA, 19 bp, synthetic construct
  misc_feature 1..19: note = Artificial sequence related to HLA knockouts in cell therapy
  source 1..19: mol_type = other DNA
aggtggggagaccacccca

SEQ ID NO: 18801 - DNA, 19 bp, synthetic construct
  misc_feature 1..19: note = Artificial sequence related to HLA knockouts in cell therapy
  source 1..19: mol_type = other DNA
ggtggggagaccaccccac

SEQ ID NO: 18802 - DNA, 19 bp, synthetic construct
  misc_feature 1..19: note = Artificial sequence related to HLA knockouts in cell therapy
  source 1..19: mol_type = other DNA
gtggggagaccaccccacc

SEQ ID NO: 18803 - DNA, 19 bp, synthetic construct
  misc_feature 1..19: note = Artificial sequence related to HLA knockouts in cell therapy
  source 1..19: mol_type = other DNA
tggggagaccaccccaccc

SEQ ID NO: 18804 - DNA, 19 bp, synthetic construct
  misc_feature 1..19: note = Artificial sequence related to HLA knockouts in cell therapy
  source 1..19: mol_type = other DNA
ggggagaccaccccacccc

SEQ ID NO: 18805 - DNA, 19 bp, synthetic construct
  misc_feature 1..19: note = Artificial sequence related to HLA knockouts in cell therapy
  source 1..19: mol_type = other DNA
gggagaccaccccaccccc

SEQ ID NO: 18806 - DNA, 19 bp, synthetic construct
  misc_feature 1..19: note = Artificial sequence related to HLA knockouts in cell therapy
  source 1..19: mol_type = other DNA
ggagaccaccccaccccca

SEQ ID NO: 18807 - DNA, 19 bp, synthetic construct
  misc_feature 1..19: note = Artificial sequence related to HLA knockouts in cell therapy
  source 1..19: mol_type = other DNA
gagaccaccccacccccat

SEQ ID NO: 18808 - DNA, 19 bp, synthetic construct
  misc_feature 1..19: note = Artificial sequence related to HLA knockouts in cell therapy
  source 1..19: mol_type = other DNA
agaccaccccacccccatg

SEQ ID NO: 18809 - DNA, 19 bp, synthetic construct
  misc_feature 1..19: note = Artificial sequence related to HLA knockouts in cell therapy
  source 1..19: mol_type = other DNA
gaccaccccacccccatgt

SEQ ID NO: 18810 - DNA, 19 bp, synthetic construct
  misc_feature 1..19: note = Artificial sequence related to HLA knockouts in cell therapy
  source 1..19: mol_type = other DNA
accaccccacccccatgtc

SEQ ID NO: 18811 - DNA, 19 bp, synthetic construct
  misc_feature 1..19: note = Artificial sequence related to HLA knockouts in cell therapy
  source 1..19: mol_type = other DNA
ccaccccacccccatgtcc

SEQ ID NO: 18812 - DNA, 19 bp, synthetic construct
  misc_feature 1..19: note = Artificial sequence related to HLA knockouts in cell therapy
  source 1..19: mol_type = other DNA
caccccacccccatgtcca

SEQ ID NO: 18813 - DNA, 19 bp, synthetic construct
  misc_feature 1..19: note = Artificial sequence related to HLA knockouts in cell therapy
  source 1..19: mol_type = other DNA
accccacccccatgtccac

SEQ ID NO: 18814 - DNA, 19 bp, synthetic construct
  misc_feature 1..19: note = Artificial sequence related to HLA knockouts in cell therapy
  source 1..19: mol_type = other DNA
ccccacccccatgtccacc

SEQ ID NO: 18815 - DNA, 19 bp, synthetic construct
  misc_feature 1..19: note = Artificial sequence related to HLA knockouts in cell therapy
  source 1..19: mol_type = other DNA
cccacccccatgtccacca

SEQ ID NO: 18816 - DNA, 19 bp, synthetic construct
  misc_feature 1..19: note = Artificial sequence related to HLA knockouts in cell therapy
  source 1..19: mol_type = other DNA
ccacccccatgtccaccat

SEQ ID NO: 18817 - DNA, 19 bp, synthetic construct
  misc_feature 1..19: note = Artificial sequence related to HLA knockouts in cell therapy
  source 1..19: mol_type = other DNA
cacccccatgtccaccatg

SEQ ID NO: 18818 - DNA, 19 bp, synthetic construct
  misc_feature 1..19: note = Artificial sequence related to HLA knockouts in cell therapy
  source 1..19: mol_type = other DNA
cccccatgtccaccatgac

SEQ ID NO: 18819 - DNA, 19 bp, synthetic construct
  misc_feature 1..19: note = Artificial sequence related to HLA knockouts in cell therapy
  source 1..19: mol_type = other DNA
ccccatgtccaccatgacc

SEQ ID NO: 18820 - DNA, 19 bp, synthetic construct
  misc_feature 1..19: note = Artificial sequence related to HLA knockouts in cell therapy
  source 1..19: mol_type = other DNA
cccatgtccaccatgaccc

SEQ ID NO: 18821 - DNA, 19 bp, synthetic construct
  misc_feature 1..19: note = Artificial sequence related to HLA knockouts in cell therapy
  source 1..19: mol_type = other DNA
ccaccatgaccctcttccc

SEQ ID NO: 18822 - DNA, 19 bp, synthetic construct
  misc_feature 1..19: note = Artificial sequence related to HLA knockouts in cell therapy
  source 1..19: mol_type = other DNA
ccatgaccctcttcccacg

SEQ ID NO: 18823 - DNA, 19 bp, synthetic construct
  misc_feature 1..19: note = Artificial sequence related to HLA knockouts in cell therapy
  source 1..19: mol_type = other DNA
catgaccctcttcccacgc

SEQ ID NO: 18824 - DNA, 19 bp, synthetic construct
  misc_feature 1..19: note = Artificial sequence related to HLA knockouts in cell therapy
  source 1..19: mol_type = other DNA
tgaccctcttcccacgctg

SEQ ID NO: 18825 - DNA, 19 bp, synthetic construct
  misc_feature 1..19: note = Artificial sequence related to HLA knockouts in cell therapy
  source 1..19: mol_type = other DNA
gaccctcttcccacgctga

SEQ ID NO: 18826 - DNA, 19 bp, synthetic construct
  misc_feature 1..19: note = Artificial sequence related to HLA knockouts in cell therapy
  source 1..19: mol_type = other DNA
accctcttcccacgctgac

SEQ ID NO: 18827 - DNA, 19 bp, synthetic construct
  misc_feature 1..19: note = Artificial sequence related to HLA knockouts in cell therapy
  source 1..19: mol_type = other DNA
ccctcttcccacgctgacc

SEQ ID NO: 18828 - DNA, 19 bp, synthetic construct
  misc_feature 1..19: note = Artificial sequence related to HLA knockouts in cell therapy
  source 1..19: mol_type = other DNA
cctcttcccacgctgacct

SEQ ID NO: 18829 - DNA, 19 bp, synthetic construct
  misc_feature 1..19: note = Artificial sequence related to HLA knockouts in cell therapy
  source 1..19: mol_type = other DNA
ctcttcccacgctgacctg

SEQ ID NO: 18830 - DNA, 19 bp, synthetic construct
  misc_feature 1..19: note = Artificial sequence related to HLA knockouts in cell therapy
  source 1..19: mol_type = other DNA
cttcccacgctgacctgtg

SEQ ID NO: 18831 - DNA, 19 bp, synthetic construct
  misc_feature 1..19: note = Artificial sequence related to HLA knockouts in cell therapy
  source 1..19: mol_type = other DNA
ttcccacgctgacctgtgc

SEQ ID NO: 18832 - DNA, 19 bp, synthetic construct
  misc_feature 1..19: note = Artificial sequence related to HLA knockouts in cell therapy
  source 1..19: mol_type = other DNA
tcccacgctgacctgtgct

SEQ ID NO: 18833 - DNA, 19 bp, synthetic construct
  misc_feature 1..19: note = Artificial sequence related to HLA knockouts in cell therapy
  source 1..19: mol_type = other DNA
cccacgctgacctgtgctc

SEQ ID NO: 18834 - DNA, 19 bp, synthetic construct
  misc_feature 1..19: note = Artificial sequence related to HLA knockouts in cell therapy
  source 1..19: mol_type = other DNA
ccacgctgacctgtgctcc

SEQ ID NO: 18835 - DNA, 19 bp, synthetic construct
  misc_feature 1..19: note = Artificial sequence related to HLA knockouts in cell therapy
  source 1..19: mol_type = other DNA
cacgctgacctgtgctccc

SEQ ID NO: 18836 - DNA, 19 bp, synthetic construct
  misc_feature 1..19: note = Artificial sequence related to HLA knockouts in cell therapy
  source 1..19: mol_type = other DNA
acgctgacctgtgctccct

SEQ ID NO: 18837 - DNA, 19 bp, synthetic construct
  misc_feature 1..19: note = Artificial sequence related to HLA knockouts in cell therapy
  source 1..19: mol_type = other DNA
cgctgacctgtgctccctc

SEQ ID NO: 18838 - DNA, 19 bp, synthetic construct
  misc_feature 1..19: note = Artificial sequence related to HLA knockouts in cell therapy
  source 1..19: mol_type = other DNA
gctgacctgtgctccctcc

SEQ ID NO: 18839 - DNA, 19 bp, synthetic construct
  misc_feature 1..19: note = Artificial sequence related to HLA knockouts in cell therapy
  source 1..19: mol_type = other DNA
ctgacctgtgctccctccc

SEQ ID NO: 18840 - DNA, 19 bp, synthetic construct
  misc_feature 1..19: note = Artificial sequence related to HLA knockouts in cell therapy
  source 1..19: mol_type = other DNA
tgacctgtgctccctcccc

SEQ ID NO: 18841 - DNA, 19 bp, synthetic construct
  misc_feature 1..19: note = Artificial sequence related to HLA knockouts in cell therapy
  source 1..19: mol_type = other DNA
gacctgtgctccctcccca

SEQ ID NO: 18842 - DNA, 19 bp, synthetic construct
  misc_feature 1..19: note = Artificial sequence related to HLA knockouts in cell therapy
  source 1..19: mol_type = other DNA
acctgtgctccctccccaa

SEQ ID NO: 18843 - DNA, 19 bp, synthetic construct
  misc_feature 1..19: note = Artificial sequence related to HLA knockouts in cell therapy
  source 1..19: mol_type = other DNA
cctgtgctccctccccaat

SEQ ID NO: 18844 - DNA, 19 bp, synthetic construct
  misc_feature 1..19: note = Artificial sequence related to HLA knockouts in cell therapy
  source 1..19: mol_type = other DNA
ctgtgctccctccccaatc

SEQ ID NO: 18845 - DNA, 19 bp, synthetic construct
  misc_feature 1..19: note = Artificial sequence related to HLA knockouts in cell therapy
  source 1..19: mol_type = other DNA
cctgttccagagaggtggg

SEQ ID NO: 18846 - DNA, 19 bp, synthetic construct
  misc_feature 1..19: note = Artificial sequence related to HLA knockouts in cell therapy
  source 1..19: mol_type = other DNA
ctgttccagagaggtgggg

SEQ ID NO: 18847 - DNA, 19 bp, synthetic construct
  misc_feature 1..19: note = Artificial sequence related to HLA knockouts in cell therapy
  source 1..19: mol_type = other DNA
tgttccagagaggtggggc

SEQ ID NO: 18848 - DNA, 19 bp, synthetic construct
  misc_feature 1..19: note = Artificial sequence related to HLA knockouts in cell therapy
  source 1..19: mol_type = other DNA
gttccagagaggtggggct

SEQ ID NO: 18849 - DNA, 19 bp, synthetic construct
  misc_feature 1..19: note = Artificial sequence related to HLA knockouts in cell therapy
  source 1..19: mol_type = other DNA
ttccagagaggtggggctg

SEQ ID NO: 18850 - DNA, 19 bp, synthetic construct
  misc_feature 1..19: note = Artificial sequence related to HLA knockouts in cell therapy
  source 1..19: mol_type = other DNA
tccagagaggtggggctga

SEQ ID NO: 18851 - DNA, 19 bp, synthetic construct
  misc_feature 1..19: note = Artificial sequence related to HLA knockouts in cell therapy
  source 1..19: mol_type = other DNA
ccagagaggtggggctgag

SEQ ID NO: 18852 - DNA, 19 bp, synthetic construct
  misc_feature 1..19: note = Artificial sequence related to HLA knockouts in cell therapy
  source 1..19: mol_type = other DNA
cagagaggtggggctgagg

SEQ ID NO: 18853 - DNA, 19 bp, synthetic construct
  misc_feature 1..19: note = Artificial sequence related to HLA knockouts in cell therapy
  source 1..19: mol_type = other DNA
agagaggtggggctgaggt

SEQ ID NO: 18854 - DNA, 19 bp, synthetic construct
  misc_feature 1..19: note = Artificial sequence related to HLA knockouts in cell therapy
  source 1..19: mol_type = other DNA
gagaggtggggctgaggtg

SEQ ID NO: 18855 - DNA, 19 bp, synthetic construct
  misc_feature 1..19: note = Artificial sequence related to HLA knockouts in cell therapy
  source 1..19: mol_type = other DNA
agaggtggggctgaggtgt

SEQ ID NO: 18856 - DNA, 19 bp, synthetic construct
  misc_feature 1..19: note = Artificial sequence related to HLA knockouts in cell therapy
  source 1..19: mol_type = other DNA
gaggtggggctgaggtgtc

SEQ ID NO: 18857 - DNA, 19 bp, synthetic construct
  misc_feature 1..19: note = Artificial sequence related to HLA knockouts in cell therapy
  source 1..19: mol_type = other DNA
aggtggggctgaggtgtct

SEQ ID NO: 18858 - DNA, 19 bp, synthetic construct
  misc_feature 1..19: note = Artificial sequence related to HLA knockouts in cell therapy
  source 1..19: mol_type = other DNA
ggtggggctgaggtgtctc

SEQ ID NO: 18859 - DNA, 19 bp, synthetic construct
  misc_feature 1..19: note = Artificial sequence related to HLA knockouts in cell therapy
  source 1..19: mol_type = other DNA
gtggggctgaggtgtctcc

SEQ ID NO: 18860 - DNA, 19 bp, synthetic construct
  misc_feature 1..19: note = Artificial sequence related to HLA knockouts in cell therapy
  source 1..19: mol_type = other DNA
tggggctgaggtgtctcca

SEQ ID NO: 18861 - DNA, 19 bp, synthetic construct
  misc_feature 1..19: note = Artificial sequence related to HLA knockouts in cell therapy
  source 1..19: mol_type = other DNA
ggggctgaggtgtctccat

SEQ ID NO: 18862 - DNA, 19 bp, synthetic construct
  misc_feature 1..19: note = Artificial sequence related to HLA knockouts in cell therapy
  source 1..19: mol_type = other DNA
gggctgaggtgtctccatc

SEQ ID NO: 18863 - DNA, 20 bp, synthetic construct
  misc_feature 1..20: note = Artificial sequence related to HLA knockouts in cell therapy
  source 1..20: mol_type = other DNA
cagaagcagaggggtcaggg

SEQ ID NO: 18864 - DNA, 20 bp, synthetic construct
  misc_feature 1..20: note = Artificial sequence related to HLA knockouts in cell therapy
  source 1..20: mol_type = other DNA
agaagcagaggggtcagggc

SEQ ID NO: 18865 - DNA, 20 bp, synthetic construct
  misc_feature 1..20: note = Artificial sequence related to HLA knockouts in cell therapy
  source 1..20: mol_type = other DNA
gaagcagaggggtcagggcg

SEQ ID NO: 18866 - DNA, 20 bp, synthetic construct
  misc_feature 1..20: note = Artificial sequence related to HLA knockouts in cell therapy
  source 1..20: mol_type = other DNA
aagcagaggggtcagggcga

SEQ ID NO: 18867 - DNA, 20 bp, synthetic construct
  misc_feature 1..20: note = Artificial sequence related to HLA knockouts in cell therapy
  source 1..20: mol_type = other DNA
agcagaggggtcagggcgaa

SEQ ID NO: 18868 - DNA, 20 bp, synthetic construct
  misc_feature 1..20: note = Artificial sequence related to HLA knockouts in cell therapy
  source 1..20: mol_type = other DNA
gcagaggggtcagggcgaag

SEQ ID NO: 18869 - DNA, 20 bp, synthetic construct
  misc_feature 1..20: note = Artificial sequence related to HLA knockouts in cell therapy
  source 1..20: mol_type = other DNA
cagaggggtcagggcgaagt

SEQ ID NO: 18870 - DNA, 20 bp, synthetic construct
  misc_feature 1..20: note = Artificial sequence related to HLA knockouts in cell therapy
  source 1..20: mol_type = other DNA
agaggggtcagggcgaagtc

SEQ ID NO: 18871 - DNA, 20 bp, synthetic construct
  misc_feature 1..20: note = Artificial sequence related to HLA knockouts in cell therapy
  source 1..20: mol_type = other DNA
gaggggtcagggcgaagtcc

SEQ ID NO: 18872 - DNA, 20 bp, synthetic construct
  misc_feature 1..20: note = Artificial sequence related to HLA knockouts in cell therapy
  source 1..20: mol_type = other DNA
aggggtcagggcgaagtccc

SEQ ID NO: 18873 - DNA, 20 bp, synthetic construct
  misc_feature 1..20: note = Artificial sequence related to HLA knockouts in cell therapy
  source 1..20: mol_type = other DNA
ggggtcagggcgaagtccca

SEQ ID NO: 18874 - DNA, 20 bp, synthetic construct
  misc_feature 1..20: note = Artificial sequence related to HLA knockouts in cell therapy
  source 1..20: mol_type = other DNA
gggtcagggcgaagtcccag

SEQ ID NO: 18875 - DNA, 20 bp, synthetic construct
  misc_feature 1..20: note = Artificial sequence related to HLA knockouts in cell therapy
  source 1..20: mol_type = other DNA
ggtcagggcgaagtcccagg

SEQ ID NO: 18876 - DNA, 20 bp, synthetic construct
  misc_feature 1..20: note = Artificial sequence related to HLA knockouts in cell therapy
  source 1..20: mol_type = other DNA
gtcagggcgaagtcccaggg

SEQ ID NO: 18877 - DNA, 20 bp, synthetic construct
  misc_feature 1..20: note = Artificial sequence related to HLA knockouts in cell therapy
  source 1..20: mol_type = other DNA
tcagggcgaagtcccagggc

SEQ ID NO: 18878 - DNA, 20 bp, synthetic construct
  misc_feature 1..20: note = Artificial sequence related to HLA knockouts in cell therapy
  source 1..20: mol_type = other DNA
cagggcgaagtcccagggcc

SEQ ID NO: 18879 - DNA, 20 bp, synthetic construct
  misc_feature 1..20: note = Artificial sequence related to HLA knockouts in cell therapy
  source 1..20: mol_type = other DNA
agggcgaagtcccagggccc

SEQ ID NO: 18880 - DNA, 20 bp, synthetic construct
  misc_feature 1..20: note = Artificial sequence related to HLA knockouts in cell therapy
  source 1..20: mol_type = other DNA
gggcgaagtcccagggcccc

SEQ ID NO: 18881 - DNA, 20 bp, synthetic construct
  misc_feature 1..20: note = Artificial sequence related to HLA knockouts in cell therapy
  source 1..20: mol_type = other DNA
ggcgaagtcccagggcccca

SEQ ID NO: 18882 - DNA, 20 bp, synthetic construct
  misc_feature 1..20: note = Artificial sequence related to HLA knockouts in cell therapy
  source 1..20: mol_type = other DNA
gcgaagtcccagggccccag

SEQ ID NO: 18883 - DNA, 20 bp, synthetic construct
  misc_feature 1..20: note = Artificial sequence related to HLA knockouts in cell therapy
  source 1..20: mol_type = other DNA
cgaagtcccagggccccagg

SEQ ID NO: 18884 - DNA, 20 bp, synthetic construct
  misc_feature 1..20: note = Artificial sequence related to HLA knockouts in cell therapy
  source 1..20: mol_type = other DNA
gaagtcccagggccccaggc

SEQ ID NO: 18885 - DNA, 20 bp, synthetic construct
  misc_feature 1..20: note = Artificial sequence related to HLA knockouts in cell therapy
  source 1..20: mol_type = other DNA
aagtcccagggccccaggcg

SEQ ID NO: 18886 - DNA, 20 bp, synthetic construct
  misc_feature 1..20: note = Artificial sequence related to HLA knockouts in cell therapy
  source 1..20: mol_type = other DNA
agtcccagggccccaggcgt

SEQ ID NO: 18887 - DNA, 20 bp, synthetic construct
  misc_feature 1..20: note = Artificial sequence related to HLA knockouts in cell therapy
  source 1..20: mol_type = other DNA
gtcccagggccccaggcgtg

SEQ ID NO: 18888 - DNA, 20 bp, synthetic construct
  misc_feature 1..20: note = Artificial sequence related to HLA knockouts in cell therapy
  source 1..20: mol_type = other DNA
tcccagggccccaggcgtgg

SEQ ID NO: 18889 - DNA, 20 bp, synthetic construct
  misc_feature 1..20: note = Artificial sequence related to HLA knockouts in cell therapy
  source 1..20: mol_type = other DNA
cccagggccccaggcgtggc

SEQ ID NO: 18890 - DNA, 20 bp, synthetic construct
  misc_feature 1..20: note = Artificial sequence related to HLA knockouts in cell therapy
  source 1..20: mol_type = other DNA
ccagggccccaggcgtggct

SEQ ID NO: 18891 - DNA, 20 bp, synthetic construct
  misc_feature 1..20: note = Artificial sequence related to HLA knockouts in cell therapy
  source 1..20: mol_type = other DNA
cagggccccaggcgtggctc

SEQ ID NO: 18892 - DNA, 20 bp, synthetic construct
  misc_feature 1..20: note = Artificial sequence related to HLA knockouts in cell therapy
  source 1..20: mol_type = other DNA
agggccccaggcgtggctct

SEQ ID NO: 18893 - DNA, 20 bp, synthetic construct
  misc_feature 1..20: note = Artificial sequence related to HLA knockouts in cell therapy
  source 1..20: mol_type = other DNA
gggccccaggcgtggctctc

SEQ ID NO: 18894 - DNA, 20 bp, synthetic construct
  misc_feature 1..20: note = Artificial sequence related to HLA knockouts in cell therapy
  source 1..20: mol_type = other DNA
ggccccaggcgtggctctca

SEQ ID NO: 18895 - DNA, 20 bp, synthetic construct
  misc_feature 1..20: note = Artificial sequence related to HLA knockouts in cell therapy
  source 1..20: mol_type = other DNA
gccccaggcgtggctctcag

SEQ ID NO: 18896 - DNA, 20 bp, synthetic construct
  misc_feature 1..20: note = Artificial sequence related to HLA knockouts in cell therapy
  source 1..20: mol_type = other DNA
ccccaggcgtggctctcagg

SEQ ID NO: 18897 - DNA, 20 bp, synthetic construct
  misc_feature 1..20: note = Artificial sequence related to HLA knockouts in cell therapy
  source 1..20: mol_type = other DNA
cccaggcgtggctctcaggg

SEQ ID NO: 18898 - DNA, 20 bp, synthetic construct
  misc_feature 1..20: note = Artificial sequence related to HLA knockouts in cell therapy
  source 1..20: mol_type = other DNA
ccaggcgtggctctcagggt

SEQ ID NO: 18899 - DNA, 20 bp, synthetic construct
  misc_feature 1..20: note = Artificial sequence related to HLA knockouts in cell therapy
  source 1..20: mol_type = other DNA
caggcgtggctctcagggtc

SEQ ID NO: 18900 - DNA, 20 bp, synthetic construct
  misc_feature 1..20: note = Artificial sequence related to HLA knockouts in cell therapy
  source 1..20: mol_type = other DNA
aggcgtggctctcagggtct

SEQ ID NO: 18901 - DNA, 20 bp, synthetic construct
  misc_feature 1..20: note = Artificial sequence related to HLA knockouts in cell therapy
  source 1..20: mol_type = other DNA
ggcgtggctctcagggtctc

SEQ ID NO: 18902 - DNA, 20 bp, synthetic construct
  misc_feature 1..20: note = Artificial sequence related to HLA knockouts in cell therapy
  source 1..20: mol_type = other DNA
gcgtggctctcagggtctca

SEQ ID NO: 18903 - DNA, 20 bp, synthetic construct
  misc_feature 1..20: note = Artificial sequence related to HLA knockouts in cell therapy
  source 1..20: mol_type = other DNA
cgtggctctcagggtctcag

SEQ ID NO: 18904 - DNA, 20 bp, synthetic construct
  misc_feature 1..20: note = Artificial sequence related to HLA knockouts in cell therapy
  source 1..20: mol_type = other DNA
gtggctctcagggtctcagg

SEQ ID NO: 18905 - DNA, 20 bp, synthetic construct
  misc_feature 1..20: note = Artificial sequence related to HLA knockouts in cell therapy
  source 1..20: mol_type = other DNA
tggctctcagggtctcaggc

SEQ ID NO: 18906 - DNA, 20 bp, synthetic construct
  misc_feature 1..20: note = Artificial sequence related to HLA knockouts in cell therapy
  source 1..20: mol_type = other DNA
ggctctcagggtctcaggcc

SEQ ID NO: 18907 - DNA, 20 bp, synthetic construct
  misc_feature 1..20: note = Artificial sequence related to HLA knockouts in cell therapy
  source 1..20: mol_type = other DNA
gctctcagggtctcaggccc

SEQ ID NO: 18908 - DNA, 20 bp, synthetic construct
  misc_feature 1..20: note = Artificial sequence related to HLA knockouts in cell therapy
  source 1..20: mol_type = other DNA
ctctcagggtctcaggcccc

SEQ ID NO: 18909 - DNA, 20 bp, synthetic construct
  misc_feature 1..20: note = Artificial sequence related to HLA knockouts in cell therapy
  source 1..20: mol_type = other DNA
tctcagggtctcaggccccg

SEQ ID NO: 18910 - DNA, 20 bp, synthetic construct
  misc_feature 1..20: note = Artificial sequence related to HLA knockouts in cell therapy
  source 1..20: mol_type = other DNA
ctcagggtctcaggccccga

SEQ ID NO: 18911 - DNA, 20 bp, synthetic construct
  misc_feature 1..20: note = Artificial sequence related to HLA knockouts in cell therapy
  source 1..20: mol_type = other DNA
tcagggtctcaggccccgaa

SEQ ID NO: 18912 - DNA, 20 bp, synthetic construct
  misc_feature 1..20: note = Artificial sequence related to HLA knockouts in cell therapy
  source 1..20: mol_type = other DNA
cagggtctcaggccccgaag

SEQ ID NO: 18913 - DNA, 20 bp, synthetic construct
  misc_feature 1..20: note = Artificial sequence related to HLA knockouts in cell therapy
  source 1..20: mol_type = other DNA
agggtctcaggccccgaagg

SEQ ID NO: 18914 - DNA, 20 bp, synthetic construct
  misc_feature 1..20: note = Artificial sequence related to HLA knockouts in cell therapy
  source 1..20: mol_type = other DNA
gggtctcaggccccgaaggc

SEQ ID NO: 18915 - DNA, 20 bp, synthetic construct
  misc_feature 1..20: note = Artificial sequence related to HLA knockouts in cell therapy
  source 1..20: mol_type = other DNA
ggtctcaggccccgaaggcg

SEQ ID NO: 18916 - DNA, 20 bp, synthetic construct
  misc_feature 1..20: note = Artificial sequence related to HLA knockouts in cell therapy
  source 1..20: mol_type = other DNA
gtctcaggccccgaaggcgg

SEQ ID NO: 18917 - DNA, 20 bp, synthetic construct
  misc_feature 1..20: note = Artificial sequence related to HLA knockouts in cell therapy
  source 1..20: mol_type = other DNA
tctcaggccccgaaggcggt

SEQ ID NO: 18918 - DNA, 20 bp, synthetic construct
  misc_feature 1..20: note = Artificial sequence related to HLA knockouts in cell therapy
  source 1..20: mol_type = other DNA
ctcaggccccgaaggcggtg

SEQ ID NO: 18919 - DNA, 20 bp, synthetic construct
  misc_feature 1..20: note = Artificial sequence related to HLA knockouts in cell therapy
  source 1..20: mol_type = other DNA
tcaggccccgaaggcggtgt

SEQ ID NO: 18920 - DNA, 20 bp, synthetic construct
  misc_feature 1..20: note = Artificial sequence related to HLA knockouts in cell therapy
  source 1..20: mol_type = other DNA
caggccccgaaggcggtgta

SEQ ID NO: 18921 - DNA, 20 bp, synthetic construct
  misc_feature 1..20: note = Artificial sequence related to HLA knockouts in cell therapy
  source 1..20: mol_type = other DNA
aggccccgaaggcggtgtat

SEQ ID NO: 18922 - DNA, 20 bp, synthetic construct
  misc_feature 1..20: note = Artificial sequence related to HLA knockouts in cell therapy
  source 1..20: mol_type = other DNA
ggccccgaaggcggtgtatg

SEQ ID NO: 18923 - DNA, 20 bp, synthetic construct
  misc_feature 1..20: note = Artificial sequence related to HLA knockouts in cell therapy
  source 1..20: mol_type = other DNA
gccccgaaggcggtgtatgg

SEQ ID NO: 18924 - DNA, 20 bp, synthetic construct
  misc_feature 1..20: note = Artificial sequence related to HLA knockouts in cell therapy
  source 1..20: mol_type = other DNA
ccccgaaggcggtgtatgga

SEQ ID NO: 18925 - DNA, 20 bp, synthetic construct
  misc_feature 1..20: note = Artificial sequence related to HLA knockouts in cell therapy
  source 1..20: mol_type = other DNA
cccgaaggcggtgtatggat

SEQ ID NO: 18926 - DNA, 20 bp, synthetic construct
  misc_feature 1..20: note = Artificial sequence related to HLA knockouts in cell therapy
  source 1..20: mol_type = other DNA
aggcggtgtatggattgggg

SEQ ID NO: 18927 - DNA, 20 bp, synthetic construct
  misc_feature 1..20: note = Artificial sequence related to HLA knockouts in cell therapy
  source 1..20: mol_type = other DNA
ggcggtgtatggattgggga

SEQ ID NO: 18928 - DNA, 20 bp, synthetic construct
  misc_feature 1..20: note = Artificial sequence related to HLA knockouts in cell therapy
  source 1..20: mol_type = other DNA
gcggtgtatggattggggag

SEQ ID NO: 18929 - DNA, 20 bp, synthetic construct
  misc_feature 1..20: note = Artificial sequence related to HLA knockouts in cell therapy
  source 1..20: mol_type = other DNA
atggattggggagtcccagc

SEQ ID NO: 18930 - DNA, 20 bp, synthetic construct
  misc_feature 1..20: note = Artificial sequence related to HLA knockouts in cell therapy
  source 1..20: mol_type = other DNA
tggattggggagtcccagcc

SEQ ID NO: 18931 - DNA, 20 bp, synthetic construct
  misc_feature 1..20: note = Artificial sequence related to HLA knockouts in cell therapy
  source 1..20: mol_type = other DNA
ggattggggagtcccagcct

SEQ ID NO: 18932 - DNA, 20 bp, synthetic construct
  misc_feature 1..20: note = Artificial sequence related to HLA knockouts in cell therapy
  source 1..20: mol_type = other DNA
gattggggagtcccagcctt

SEQ ID NO: 18933 - DNA, 20 bp, synthetic construct
  misc_feature 1..20: note = Artificial sequence related to HLA knockouts in cell therapy
  source 1..20: mol_type = other DNA
attggggagtcccagccttg

SEQ ID NO: 18934 - DNA, 20 bp, synthetic construct
  misc_feature 1..20: note = Artificial sequence related to HLA knockouts in cell therapy
  source 1..20: mol_type = other DNA
ttggggagtcccagccttgg

SEQ ID NO: 18935 - DNA, 20 bp, synthetic construct
  misc_feature 1..20: note = Artificial sequence related to HLA knockouts in cell therapy
  source 1..20: mol_type = other DNA
tggggagtcccagccttggg

SEQ ID NO: 18936 - DNA, 20 bp, synthetic construct
  misc_feature 1..20: note = Artificial sequence related to HLA knockouts in cell therapy
  source 1..20: mol_type = other DNA
ggggagtcccagccttgggg

SEQ ID NO: 18937 - DNA, 20 bp, synthetic construct
  misc_feature 1..20: note = Artificial sequence related to HLA knockouts in cell therapy
  source 1..20: mol_type = other DNA
gggagtcccagccttgggga

SEQ ID NO: 18938 - DNA, 20 bp, synthetic construct
  misc_feature 1..20: note = Artificial sequence related to HLA knockouts in cell therapy
  source 1..20: mol_type = other DNA
ggagtcccagccttggggat

SEQ ID NO: 18939 - DNA, 20 bp, synthetic construct
  misc_feature 1..20: note = Artificial sequence related to HLA knockouts in cell therapy
  source 1..20: mol_type = other DNA
gagtcccagccttggggatt

SEQ ID NO: 18940 - DNA, 20 bp, synthetic construct
  misc_feature 1..20: note = Artificial sequence related to HLA knockouts in cell therapy
  source 1..20: mol_type = other DNA
agtcccagccttggggattc

SEQ ID NO: 18941 - DNA, 20 bp, synthetic construct
  misc_feature 1..20: note = Artificial sequence related to HLA knockouts in cell therapy
  source 1..20: mol_type = other DNA
gtcccagccttggggattcc

SEQ ID NO: 18942 - DNA, 20 bp, synthetic construct
  misc_feature 1..20: note = Artificial sequence related to HLA knockouts in cell therapy
  source 1..20: mol_type = other DNA
tcccagccttggggattccc

SEQ ID NO: 18943 - DNA, 20 bp, synthetic construct
  misc_feature 1..20: note = Artificial sequence related to HLA knockouts in cell therapy
  source 1..20: mol_type = other DNA
cccagccttggggattcccc

SEQ ID NO: 18944 - DNA, 20 bp, synthetic construct
  misc_feature 1..20: note = Artificial sequence related to HLA knockouts in cell therapy
  source 1..20: mol_type = other DNA
ccagccttggggattcccca

SEQ ID NO: 18945 - DNA, 20 bp, synthetic construct
  misc_feature 1..20: note = Artificial sequence related to HLA knockouts in cell therapy
  source 1..20: mol_type = other DNA
cagccttggggattccccaa

SEQ ID NO: 18946 - DNA, 20 bp, synthetic construct
  misc_feature 1..20: note = Artificial sequence related to HLA knockouts in cell therapy
  source 1..20: mol_type = other DNA
agccttggggattccccaac

SEQ ID NO: 18947 - DNA, 20 bp, synthetic construct
  misc_feature 1..20: note = Artificial sequence related to HLA knockouts in cell therapy
  source 1..20: mol_type = other DNA
gccttggggattccccaact

SEQ ID NO: 18948 - DNA, 20 bp, synthetic construct
  misc_feature 1..20: note = Artificial sequence related to HLA knockouts in cell therapy
  source 1..20: mol_type = other DNA
ccttggggattccccaactc

SEQ ID NO: 18949 - DNA, 20 bp, synthetic construct
  misc_feature 1..20: note = Artificial sequence related to HLA knockouts in cell therapy
  source 1..20: mol_type = other DNA
cttggggattccccaactcc

SEQ ID NO: 18950 - DNA, 20 bp, synthetic construct
  misc_feature 1..20: note = Artificial sequence related to HLA knockouts in cell therapy
  source 1..20: mol_type = other DNA
ttggggattccccaactccg

SEQ ID NO: 18951 - DNA, 20 bp, synthetic construct
  misc_feature 1..20: note = Artificial sequence related to HLA knockouts in cell therapy
  source 1..20: mol_type = other DNA
tggggattccccaactccgc

SEQ ID NO: 18952 - DNA, 20 bp, synthetic construct
  misc_feature 1..20: note = Artificial sequence related to HLA knockouts in cell therapy
  source 1..20: mol_type = other DNA
ggggattccccaactccgca

SEQ ID NO: 18953 - DNA, 20 bp, synthetic construct
  misc_feature 1..20: note = Artificial sequence related to HLA knockouts in cell therapy
  source 1..20: mol_type = other DNA
gggattccccaactccgcag

SEQ ID NO: 18954 - DNA, 20 bp, synthetic construct
  misc_feature 1..20: note = Artificial sequence related to HLA knockouts in cell therapy
  source 1..20: mol_type = other DNA
ggattccccaactccgcagt

SEQ ID NO: 18955 - DNA, 20 bp, synthetic construct
  misc_feature 1..20: note = Artificial sequence related to HLA knockouts in cell therapy
  source 1..20: mol_type = other DNA
tcctggatactcacgacgcg

SEQ ID NO: 18956 - DNA, 20 bp, synthetic construct
  misc_feature 1..20: note = Artificial sequence related to HLA knockouts in cell therapy
  source 1..20: mol_type = other DNA
cctggatactcacgacgcgg

SEQ ID NO: 18957 - DNA, 20 bp, synthetic construct
  misc_feature 1..20: note = Artificial sequence related to HLA knockouts in cell therapy
  source 1..20: mol_type = other DNA
ctggatactcacgacgcgga

SEQ ID NO: 18958 - DNA, 20 bp, synthetic construct
  misc_feature 1..20: note = Artificial sequence related to HLA knockouts in cell therapy
  source 1..20: mol_type = other DNA
tggatactcacgacgcggac

SEQ ID NO: 18959 - DNA, 20 bp, synthetic construct
  misc_feature 1..20: note = Artificial sequence related to HLA knockouts in cell therapy
  source 1..20: mol_type = other DNA
ggatactcacgacgcggacc

SEQ ID NO: 18960 - DNA, 20 bp, synthetic construct
  misc_feature 1..20: note = Artificial sequence related to HLA knockouts in cell therapy
  source 1..20: mol_type = other DNA
gatactcacgacgcggaccc

SEQ ID NO: 18961 - DNA, 20 bp, synthetic construct
  misc_feature 1..20: note = Artificial sequence related to HLA knockouts in cell therapy
  source 1..20: mol_type = other DNA
atactcacgacgcggaccca

SEQ ID NO: 18962 - DNA, 20 bp, synthetic construct
  misc_feature 1..20: note = Artificial sequence related to HLA knockouts in cell therapy
  source 1..20: mol_type = other DNA
tactcacgacgcggacccag

SEQ ID NO: 18963 - DNA, 20 bp, synthetic construct
  misc_feature 1..20: note = Artificial sequence related to HLA knockouts in cell therapy
  source 1..20: mol_type = other DNA
actcacgacgcggacccagt

SEQ ID NO: 18964 - DNA, 20 bp, synthetic construct
  misc_feature 1..20: note = Artificial sequence related to HLA knockouts in cell therapy
  source 1..20: mol_type = other DNA
ctcacgacgcggacccagtt

SEQ ID NO: 18965 - DNA, 20 bp, synthetic construct
  misc_feature 1..20: note = Artificial sequence related to HLA knockouts in cell therapy
  source 1..20: mol_type = other DNA
tcacgacgcggacccagttc

SEQ ID NO: 18966 - DNA, 20 bp, synthetic construct
  misc_feature 1..20: note = Artificial sequence related to HLA knockouts in cell therapy
  source 1..20: mol_type = other DNA
cacgacgcggacccagttct

SEQ ID NO: 18967 - DNA, 20 bp, synthetic construct
  misc_feature 1..20: note = Artificial sequence related to HLA knockouts in cell therapy
  source 1..20: mol_type = other DNA
acgacgcggacccagttctc

SEQ ID NO: 18968 - DNA, 20 bp, synthetic construct
  misc_feature 1..20: note = Artificial sequence related to HLA knockouts in cell therapy
  source 1..20: mol_type = other DNA
cgacgcggacccagttctca

SEQ ID NO: 18969 - DNA, 20 bp, synthetic construct
  misc_feature 1..20: note = Artificial sequence related to HLA knockouts in cell therapy
  source 1..20: mol_type = other DNA
gacgcggacccagttctcac

SEQ ID NO: 18970 - DNA, 20 bp, synthetic construct
  misc_feature 1..20: note = Artificial sequence related to HLA knockouts in cell therapy
  source 1..20: mol_type = other DNA
acgcggacccagttctcact

SEQ ID NO: 18971 - DNA, 20 bp, synthetic construct
  misc_feature 1..20: note = Artificial sequence related to HLA knockouts in cell therapy
  source 1..20: mol_type = other DNA
cgcggacccagttctcactc

SEQ ID NO: 18972 - DNA, 20 bp, synthetic construct
  misc_feature 1..20: note = Artificial sequence related to HLA knockouts in cell therapy
  source 1..20: mol_type = other DNA
gcggacccagttctcactcc

SEQ ID NO: 18973 - DNA, 20 bp, synthetic construct
  misc_feature 1..20: note = Artificial sequence related to HLA knockouts in cell therapy
  source 1..20: mol_type = other DNA
cggacccagttctcactccc

SEQ ID NO: 18974 - DNA, 20 bp, synthetic construct
  misc_feature 1..20: note = Artificial sequence related to HLA knockouts in cell therapy
  source 1..20: mol_type = other DNA
ggacccagttctcactccca

SEQ ID NO: 18975 - DNA, 20 bp, synthetic construct
  misc_feature 1..20: note = Artificial sequence related to HLA knockouts in cell therapy
  source 1..20: mol_type = other DNA
ctcactcccattgggtgtcg

SEQ ID NO: 18976 - DNA, 20 bp, synthetic construct
  misc_feature 1..20: note = Artificial sequence related to HLA knockouts in cell therapy
  source 1..20: mol_type = other DNA
tcactcccattgggtgtcgg

SEQ ID NO: 18977 - DNA, 20 bp, synthetic construct
  misc_feature 1..20: note = Artificial sequence related to HLA knockouts in cell therapy
  source 1..20: mol_type = other DNA
cactcccattgggtgtcggg

SEQ ID NO: 18978 - DNA, 20 bp, synthetic construct
  misc_feature 1..20: note = Artificial sequence related to HLA knockouts in cell therapy
  source 1..20: mol_type = other DNA
actcccattgggtgtcgggt

SEQ ID NO: 18979 - DNA, 20 bp, synthetic construct
  misc_feature 1..20: note = Artificial sequence related to HLA knockouts in cell therapy
  source 1..20: mol_type = other DNA
ctcccattgggtgtcgggtt

SEQ ID NO: 18980 - DNA, 20 bp, synthetic construct
  misc_feature 1..20: note = Artificial sequence related to HLA knockouts in cell therapy
  source 1..20: mol_type = other DNA
cccattgggtgtcgggtttc

SEQ ID NO: 18981 - DNA, 20 bp, synthetic construct
  misc_feature 1..20: note = Artificial sequence related to HLA knockouts in cell therapy
  source 1..20: mol_type = other DNA
ccattgggtgtcgggtttcc

SEQ ID NO: 18982 - DNA, 20 bp, synthetic construct
  misc_feature 1..20: note = Artificial sequence related to HLA knockouts in cell therapy
  source 1..20: mol_type = other DNA
tgggtgtcgggtttccagag

SEQ ID NO: 18983 - DNA, 20 bp, synthetic construct
  misc_feature 1..20: note = Artificial sequence related to HLA knockouts in cell therapy
  source 1..20: mol_type = other DNA
gggtgtcgggtttccagaga

SEQ ID NO: 18984 - DNA, 20 bp, synthetic construct
  misc_feature 1..20: note = Artificial sequence related to HLA knockouts in cell therapy
  source 1..20: mol_type = other DNA
gtcgggtttccagagaagcc

SEQ ID NO: 18985 - DNA, 20 bp, synthetic construct
  misc_feature 1..20: note = Artificial sequence related to HLA knockouts in cell therapy
  source 1..20: mol_type = other DNA
agccaatcagtgtcgtcgcg

SEQ ID NO: 18986 - DNA, 20 bp, synthetic construct
  misc_feature 1..20: note = Artificial sequence related to HLA knockouts in cell therapy
  source 1..20: mol_type = other DNA
gccaatcagtgtcgtcgcgg

SEQ ID NO: 18987 - DNA, 20 bp, synthetic construct
  misc_feature 1..20: note = Artificial sequence related to HLA knockouts in cell therapy
  source 1..20: mol_type = other DNA
ccaatcagtgtcgtcgcggt

SEQ ID NO: 18988 - DNA, 20 bp, synthetic construct
  misc_feature 1..20: note = Artificial sequence related to HLA knockouts in cell therapy
  source 1..20: mol_type = other DNA
caatcagtgtcgtcgcggtc

SEQ ID NO: 18989 - DNA, 20 bp, synthetic construct
  misc_feature 1..20: note = Artificial sequence related to HLA knockouts in cell therapy
  source 1..20: mol_type = other DNA
aatcagtgtcgtcgcggtcg

SEQ ID NO: 18990 - DNA, 20 bp, synthetic construct
  misc_feature 1..20: note = Artificial sequence related to HLA knockouts in cell therapy
  source 1..20: mol_type = other DNA
atcagtgtcgtcgcggtcgc

SEQ ID NO: 18991 - DNA, 20 bp, synthetic construct
  misc_feature 1..20: note = Artificial sequence related to HLA knockouts in cell therapy
  source 1..20: mol_type = other DNA
tcagtgtcgtcgcggtcgcg

SEQ ID NO: 18992 - DNA, 20 bp, synthetic construct
  misc_feature 1..20: note = Artificial sequence related to HLA knockouts in cell therapy
  source 1..20: mol_type = other DNA
cagtgtcgtcgcggtcgcgg

SEQ ID NO: 18993 - DNA, 20 bp, synthetic construct
  misc_feature 1..20: note = Artificial sequence related to HLA knockouts in cell therapy
  source 1..20: mol_type = other DNA
agtgtcgtcgcggtcgcggt

SEQ ID NO: 18994 - DNA, 20 bp, synthetic construct
  misc_feature 1..20: note = Artificial sequence related to HLA knockouts in cell therapy
  source 1..20: mol_type = other DNA
gtgtcgtcgcggtcgcggtt

SEQ ID NO: 18995 - DNA, 20 bp, synthetic construct
  misc_feature 1..20: note = Artificial sequence related to HLA knockouts in cell therapy
  source 1..20: mol_type = other DNA
tgtcgtcgcggtcgcggttc

SEQ ID NO: 18996 - DNA, 20 bp, synthetic construct
  misc_feature 1..20: note = Artificial sequence related to HLA knockouts in cell therapy
  source 1..20: mol_type = other DNA
gtcgtcgcggtcgcggttct

SEQ ID NO: 18997 - DNA, 20 bp, synthetic construct
  misc_feature 1..20: note = Artificial sequence related to HLA knockouts in cell therapy
  source 1..20: mol_type = other DNA
tcgtcgcggtcgcggttcta

SEQ ID NO: 18998 - DNA, 20 bp, synthetic construct
  misc_feature 1..20: note = Artificial sequence related to HLA knockouts in cell therapy
  source 1..20: mol_type = other DNA
cgtcgcggtcgcggttctaa

SEQ ID NO: 18999 - DNA, 20 bp, synthetic construct
  misc_feature 1..20: note = Artificial sequence related to HLA knockouts in cell therapy
  source 1..20: mol_type = other DNA
gtcgcggtcgcggttctaaa

SEQ ID NO: 19000 - DNA, 20 bp, synthetic construct
  misc_feature 1..20: note = Artificial sequence related to HLA knockouts in cell therapy
  source 1..20: mol_type = other DNA
tcgcggtcgcggttctaaag

SEQ ID NO: 19001 - DNA, 20 bp, synthetic construct
  misc_feature 1..20: note = Artificial sequence related to HLA knockouts in cell therapy
  source 1..20: mol_type = other DNA
cgcggtcgcggttctaaagt

SEQ ID NO: 19002 - DNA, 20 bp, synthetic construct
  misc_feature 1..20: note = Artificial sequence related to HLA knockouts in cell therapy
  source 1..20: mol_type = other DNA
gcggtcgcggttctaaagtc

SEQ ID NO: 19003 - DNA, 20 bp, synthetic construct
  misc_feature 1..20: note = Artificial sequence related to HLA knockouts in cell therapy
  source 1..20: mol_type = other DNA
cggtcgcggttctaaagtcc

SEQ ID NO: 19004 - DNA, 20 bp, synthetic construct
  misc_feature 1..20: note = Artificial sequence related to HLA knockouts in cell therapy
  source 1..20: mol_type = other DNA
ggtcgcggttctaaagtccg

SEQ ID NO: 19005 - DNA, 20 bp, synthetic construct
  misc_feature 1..20: note = Artificial sequence related to HLA knockouts in cell therapy
  source 1..20: mol_type = other DNA
gtcgcggttctaaagtccgc

SEQ ID NO: 19006 - DNA, 20 bp, synthetic construct
  misc_feature 1..20: note = Artificial sequence related to HLA knockouts in cell therapy
  source 1..20: mol_type = other DNA
cgcggttctaaagtccgcac

SEQ ID NO: 19007 - DNA, 20 bp, synthetic construct
  misc_feature 1..20: note = Artificial sequence related to HLA knockouts in cell therapy
  source 1..20: mol_type = other DNA
gcggttctaaagtccgcacg

SEQ ID NO: 19008 - DNA, 20 bp, synthetic construct
  misc_feature 1..20: note = Artificial sequence related to HLA knockouts in cell therapy
  source 1..20: mol_type = other DNA
cggttctaaagtccgcacgc

SEQ ID NO: 19009 - DNA, 20 bp, synthetic construct
  misc_feature 1..20: note = Artificial sequence related to HLA knockouts in cell therapy
  source 1..20: mol_type = other DNA
tctaaagtccgcacgcaccc

SEQ ID NO: 19010 - DNA, 20 bp, synthetic construct
  misc_feature 1..20: note = Artificial sequence related to HLA knockouts in cell therapy
  source 1..20: mol_type = other DNA
ctaaagtccgcacgcaccca

SEQ ID NO: 19011 - DNA, 20 bp, synthetic construct
  misc_feature 1..20: note = Artificial sequence related to HLA knockouts in cell therapy
  source 1..20: mol_type = other DNA
taaagtccgcacgcacccac

SEQ ID NO: 19012 - DNA, 20 bp, synthetic construct
  misc_feature 1..20: note = Artificial sequence related to HLA knockouts in cell therapy
  source 1..20: mol_type = other DNA
aaagtccgcacgcacccacc

SEQ ID NO: 19013 - DNA, 20 bp, synthetic construct
  misc_feature 1..20: note = Artificial sequence related to HLA knockouts in cell therapy
  source 1..20: mol_type = other DNA
aagtccgcacgcacccaccg

SEQ ID NO: 19014 - DNA, 20 bp, synthetic construct
  misc_feature 1..20: note = Artificial sequence related to HLA knockouts in cell therapy
  source 1..20: mol_type = other DNA
agtccgcacgcacccaccgg

SEQ ID NO: 19015 - DNA, 20 bp, synthetic construct
  misc_feature 1..20: note = Artificial sequence related to HLA knockouts in cell therapy
  source 1..20: mol_type = other DNA
gtccgcacgcacccaccggg

SEQ ID NO: 19016 - DNA, 20 bp, synthetic construct
  misc_feature 1..20: note = Artificial sequence related to HLA knockouts in cell therapy
  source 1..20: mol_type = other DNA
tccgcacgcacccaccggga

SEQ ID NO: 19017 - DNA, 20 bp, synthetic construct
  misc_feature 1..20: note = Artificial sequence related to HLA knockouts in cell therapy
  source 1..20: mol_type = other DNA
ccgcacgcacccaccgggac

SEQ ID NO: 19018 - DNA, 20 bp, synthetic construct
  misc_feature 1..20: note = Artificial sequence related to HLA knockouts in cell therapy
  source 1..20: mol_type = other DNA
cgcacgcacccaccgggact

SEQ ID NO: 19019 - DNA, 20 bp, synthetic construct
  misc_feature 1..20: note = Artificial sequence related to HLA knockouts in cell therapy
  source 1..20: mol_type = other DNA
gcacgcacccaccgggactc

SEQ ID NO: 19020 - DNA, 20 bp, synthetic construct
  misc_feature 1..20: note = Artificial sequence related to HLA knockouts in cell therapy
  source 1..20: mol_type = other DNA
cacgcacccaccgggactca

SEQ ID NO: 19021 - DNA, 20 bp, synthetic construct
  misc_feature 1..20: note = Artificial sequence related to HLA knockouts in cell therapy
  source 1..20: mol_type = other DNA
acgcacccaccgggactcag

SEQ ID NO: 19022 - DNA, 20 bp, synthetic construct
  misc_feature 1..20: note = Artificial sequence related to HLA knockouts in cell therapy
  source 1..20: mol_type = other DNA
cgcacccaccgggactcaga

SEQ ID NO: 19023 - DNA, 20 bp, synthetic construct
  misc_feature 1..20: note = Artificial sequence related to HLA knockouts in cell therapy
  source 1..20: mol_type = other DNA
gcacccaccgggactcagat

SEQ ID NO: 19024 - DNA, 20 bp, synthetic construct
  misc_feature 1..20: note = Artificial sequence related to HLA knockouts in cell therapy
  source 1..20: mol_type = other DNA
cacccaccgggactcagatt

SEQ ID NO: 19025 - DNA, 20 bp, synthetic construct
  misc_feature 1..20: note = Artificial sequence related to HLA knockouts in cell therapy
  source 1..20: mol_type = other DNA
acccaccgggactcagattc

SEQ ID NO: 19026 - DNA, 20 bp, synthetic construct
  misc_feature 1..20: note = Artificial sequence related to HLA knockouts in cell therapy
  source 1..20: mol_type = other DNA
cccaccgggactcagattct

SEQ ID NO: 19027 - DNA, 20 bp, synthetic construct
  misc_feature 1..20: note = Artificial sequence related to HLA knockouts in cell therapy
  source 1..20: mol_type = other DNA
ccaccgggactcagattctc

SEQ ID NO: 19028 - DNA, 20 bp, synthetic construct
  misc_feature 1..20: note = Artificial sequence related to HLA knockouts in cell therapy
  source 1..20: mol_type = other DNA
caccgggactcagattctcc

SEQ ID NO: 19029 - DNA, 20 bp, synthetic construct
  misc_feature 1..20: note = Artificial sequence related to HLA knockouts in cell therapy
  source 1..20: mol_type = other DNA
accgggactcagattctccc

SEQ ID NO: 19030 - DNA, 20 bp, synthetic construct
  misc_feature 1..20: note = Artificial sequence related to HLA knockouts in cell therapy
  source 1..20: mol_type = other DNA
ccgggactcagattctcccc

SEQ ID NO: 19031 - DNA, 20 bp, synthetic construct
  misc_feature 1..20: note = Artificial sequence related to HLA knockouts in cell therapy
  source 1..20: mol_type = other DNA
cgggactcagattctcccca

SEQ ID NO: 19032 - DNA, 20 bp, synthetic construct
  misc_feature 1..20: note = Artificial sequence related to HLA knockouts in cell therapy
  source 1..20: mol_type = other DNA
gggactcagattctccccag

SEQ ID NO: 19033 - DNA, 20 bp, synthetic construct
  misc_feature 1..20: note = Artificial sequence related to HLA knockouts in cell therapy
  source 1..20: mol_type = other DNA
ctcagattctccccagacgc

SEQ ID NO: 19034 - DNA, 20 bp, synthetic construct
  misc_feature 1..20: note = Artificial sequence related to HLA knockouts in cell therapy
  source 1..20: mol_type = other DNA
tcagattctccccagacgcc

SEQ ID NO: 19035 - DNA, 20 bp, synthetic construct
  misc_feature 1..20: note = Artificial sequence related to HLA knockouts in cell therapy
  source 1..20: mol_type = other DNA
cagattctccccagacgccg

SEQ ID NO: 19036 - DNA, 20 bp, synthetic construct
  misc_feature 1..20: note = Artificial sequence related to HLA knockouts in cell therapy
  source 1..20: mol_type = other DNA
agattctccccagacgccga

SEQ ID NO: 19037 - DNA, 20 bp, synthetic construct
  misc_feature 1..20: note = Artificial sequence related to HLA knockouts in cell therapy
  source 1..20: mol_type = other DNA
gattctccccagacgccgag

SEQ ID NO: 19038 - DNA, 20 bp, synthetic construct
  misc_feature 1..20: note = Artificial sequence related to HLA knockouts in cell therapy
  source 1..20: mol_type = other DNA
attctccccagacgccgagg

SEQ ID NO: 19039 - DNA, 20 bp, synthetic construct
  misc_feature 1..20: note = Artificial sequence related to HLA knockouts in cell therapy
  source 1..20: mol_type = other DNA
ttctccccagacgccgagga

SEQ ID NO: 19040 - DNA, 20 bp, synthetic construct
  misc_feature 1..20: note = Artificial sequence related to HLA knockouts in cell therapy
  source 1..20: mol_type = other DNA
tctccccagacgccgaggat

SEQ ID NO: 19041 - DNA, 20 bp, synthetic construct
  misc_feature 1..20: note = Artificial sequence related to HLA knockouts in cell therapy
  source 1..20: mol_type = other DNA
ctccccagacgccgaggatg

SEQ ID NO: 19042 - DNA, 20 bp, synthetic construct
  misc_feature 1..20: note = Artificial sequence related to HLA knockouts in cell therapy
  source 1..20: mol_type = other DNA
tccccagacgccgaggatgg

SEQ ID NO: 19043 - DNA, 20 bp, synthetic construct
  misc_feature 1..20: note = Artificial sequence related to HLA knockouts in cell therapy
  source 1..20: mol_type = other DNA
ccccagacgccgaggatggc

SEQ ID NO: 19044 - DNA, 20 bp, synthetic construct
  misc_feature 1..20: note = Artificial sequence related to HLA knockouts in cell therapy
  source 1..20: mol_type = other DNA
cccagacgccgaggatggcc

SEQ ID NO: 19045 - DNA, 20 bp, synthetic construct
  misc_feature 1..20: note = Artificial sequence related to HLA knockouts in cell therapy
  source 1..20: mol_type = other DNA
ccagacgccgaggatggccg

SEQ ID NO: 19046 - DNA, 20 bp, synthetic construct
  misc_feature 1..20: note = Artificial sequence related to HLA knockouts in cell therapy
  source 1..20: mol_type = other DNA
cagacgccgaggatggccgt

SEQ ID NO: 19047 - DNA, 20 bp, synthetic construct
  misc_feature 1..20: note = Artificial sequence related to HLA knockouts in cell therapy
  source 1..20: mol_type = other DNA
agacgccgaggatggccgtc

SEQ ID NO: 19048 - DNA, 20 bp, synthetic construct
  misc_feature 1..20: note = Artificial sequence related to HLA knockouts in cell therapy
  source 1..20: mol_type = other DNA
gacgccgaggatggccgtca

SEQ ID NO: 19049 - DNA, 20 bp, synthetic construct
  misc_feature 1..20: note = Artificial sequence related to HLA knockouts in cell therapy
  source 1..20: mol_type = other DNA
acgccgaggatggccgtcat

SEQ ID NO: 19050 - DNA, 20 bp, synthetic construct
  misc_feature 1..20: note = Artificial sequence related to HLA knockouts in cell therapy
  source 1..20: mol_type = other DNA
cgccgaggatggccgtcatg

SEQ ID NO: 19051 - DNA, 20 bp, synthetic construct
  misc_feature 1..20: note = Artificial sequence related to HLA knockouts in cell therapy
  source 1..20: mol_type = other DNA
gccgaggatggccgtcatgg

SEQ ID NO: 19052 - DNA, 20 bp, synthetic construct
  misc_feature 1..20: note = Artificial sequence related to HLA knockouts in cell therapy
  source 1..20: mol_type = other DNA
ccgaggatggccgtcatggc

SEQ ID NO: 19053 - DNA, 20 bp, synthetic construct
  misc_feature 1..20: note = Artificial sequence related to HLA knockouts in cell therapy
  source 1..20: mol_type = other DNA
cgaggatggccgtcatggcg

SEQ ID NO: 19054 - DNA, 20 bp, synthetic construct
  misc_feature 1..20: note = Artificial sequence related to HLA knockouts in cell therapy
  source 1..20: mol_type = other DNA
gaggatggccgtcatggcgc

SEQ ID NO: 19055 - DNA, 20 bp, synthetic construct
  misc_feature 1..20: note = Artificial sequence related to HLA knockouts in cell therapy
  source 1..20: mol_type = other DNA
aggatggccgtcatggcgcc

SEQ ID NO: 19056 - DNA, 20 bp, synthetic construct
  misc_feature 1..20: note = Artificial sequence related to HLA knockouts in cell therapy
  source 1..20: mol_type = other DNA
ggatggccgtcatggcgccc

SEQ ID NO: 19057 - DNA, 20 bp, synthetic construct
  misc_feature 1..20: note = Artificial sequence related to HLA knockouts in cell therapy
  source 1..20: mol_type = other DNA
gatggccgtcatggcgcccc

SEQ ID NO: 19058 - DNA, 20 bp, synthetic construct
  misc_feature 1..20: note = Artificial sequence related to HLA knockouts in cell therapy
  source 1..20: mol_type = other DNA
atggccgtcatggcgccccg

SEQ ID NO: 19059 - DNA, 20 bp, synthetic construct
  misc_feature 1..20: note = Artificial sequence related to HLA knockouts in cell therapy
  source 1..20: mol_type = other DNA
tggccgtcatggcgccccga

SEQ ID NO: 19060 - DNA, 20 bp, synthetic construct
  misc_feature 1..20: note = Artificial sequence related to HLA knockouts in cell therapy
  source 1..20: mol_type = other DNA
ggccgtcatggcgccccgaa

SEQ ID NO: 19061 - DNA, 20 bp, synthetic construct
  misc_feature 1..20: note = Artificial sequence related to HLA knockouts in cell therapy
  source 1..20: mol_type = other DNA
gccgtcatggcgccccgaac

SEQ ID NO: 19062 - DNA, 20 bp, synthetic construct
  misc_feature 1..20: note = Artificial sequence related to HLA knockouts in cell therapy
  source 1..20: mol_type = other DNA
ccgtcatggcgccccgaacc

SEQ ID NO: 19063 - DNA, 20 bp, synthetic construct
  misc_feature 1..20: note = Artificial sequence related to HLA knockouts in cell therapy
  source 1..20: mol_type = other DNA
cgtcatggcgccccgaaccc

SEQ ID NO: 19064 - DNA, 20 bp, synthetic construct
  misc_feature 1..20: note = Artificial sequence related to HLA knockouts in cell therapy
  source 1..20: mol_type = other DNA
gtcatggcgccccgaaccct

SEQ ID NO: 19065 - DNA, 20 bp, synthetic construct
  misc_feature 1..20: note = Artificial sequence related to HLA knockouts in cell therapy
  source 1..20: mol_type = other DNA
tcatggcgccccgaaccctc

SEQ ID NO: 19066 - DNA, 20 bp, synthetic construct
  misc_feature 1..20: note = Artificial sequence related to HLA knockouts in cell therapy
  source 1..20: mol_type = other DNA
catggcgccccgaaccctcg

SEQ ID NO: 19067 - DNA, 20 bp, synthetic construct
  misc_feature 1..20: note = Artificial sequence related to HLA knockouts in cell therapy
  source 1..20: mol_type = other DNA
atggcgccccgaaccctcgt

SEQ ID NO: 19068 - DNA, 20 bp, synthetic construct
  misc_feature 1..20: note = Artificial sequence related to HLA knockouts in cell therapy
  source 1..20: mol_type = other DNA
tggcgccccgaaccctcgtc

SEQ ID NO: 19069 - DNA, 20 bp, synthetic construct
  misc_feature 1..20: note = Artificial sequence related to HLA knockouts in cell therapy
  source 1..20: mol_type = other DNA
ggcgccccgaaccctcgtcc

SEQ ID NO: 19070 - DNA, 20 bp, synthetic construct
  misc_feature 1..20: note = Artificial sequence related to HLA knockouts in cell therapy
  source 1..20: mol_type = other DNA
gcgccccgaaccctcgtcct

SEQ ID NO: 19071 - DNA, 20 bp, synthetic construct
  misc_feature 1..20: note = Artificial sequence related to HLA knockouts in cell therapy
  source 1..20: mol_type = other DNA
cgccccgaaccctcgtcctg

SEQ ID NO: 19072 - DNA, 20 bp, synthetic construct
  misc_feature 1..20: note = Artificial sequence related to HLA knockouts in cell therapy
  source 1..20: mol_type = other DNA
gccccgaaccctcgtcctgc

SEQ ID NO: 19073 - DNA, 20 bp, synthetic construct
  misc_feature 1..20: note = Artificial sequence related to HLA knockouts in cell therapy
  source 1..20: mol_type = other DNA
ccccgaaccctcgtcctgct

SEQ ID NO: 19074 - DNA, 20 bp, synthetic construct
  misc_feature 1..20: note = Artificial sequence related to HLA knockouts in cell therapy
  source 1..20: mol_type = other DNA
cccgaaccctcgtcctgcta

SEQ ID NO: 19075 - DNA, 20 bp, synthetic construct
  misc_feature 1..20: note = Artificial sequence related to HLA knockouts in cell therapy
  source 1..20: mol_type = other DNA
ccgaaccctcgtcctgctac

SEQ ID NO: 19076 - DNA, 20 bp, synthetic construct
  misc_feature 1..20: note = Artificial sequence related to HLA knockouts in cell therapy
  source 1..20: mol_type = other DNA
cgaaccctcgtcctgctact

SEQ ID NO: 19077 - DNA, 20 bp, synthetic construct
  misc_feature 1..20: note = Artificial sequence related to HLA knockouts in cell therapy
  source 1..20: mol_type = other DNA
gaaccctcgtcctgctactc

SEQ ID NO: 19078 - DNA, 20 bp, synthetic construct
  misc_feature 1..20: note = Artificial sequence related to HLA knockouts in cell therapy
  source 1..20: mol_type = other DNA
accctcgtcctgctactctc

SEQ ID NO: 19079 - DNA, 20 bp, synthetic construct
  misc_feature 1..20: note = Artificial sequence related to HLA knockouts in cell therapy
  source 1..20: mol_type = other DNA
ccctcgtcctgctactctcg

SEQ ID NO: 19080 - DNA, 20 bp, synthetic construct
  misc_feature 1..20: note = Artificial sequence related to HLA knockouts in cell therapy
  source 1..20: mol_type = other DNA
cctcgtcctgctactctcgg

SEQ ID NO: 19081 - DNA, 20 bp, synthetic construct
  misc_feature 1..20: note = Artificial sequence related to HLA knockouts in cell therapy
  source 1..20: mol_type = other DNA
ctcgtcctgctactctcggg

SEQ ID NO: 19082 - DNA, 20 bp, synthetic construct
  misc_feature 1..20: note = Artificial sequence related to HLA knockouts in cell therapy
  source 1..20: mol_type = other DNA
tcgtcctgctactctcgggg

SEQ ID NO: 19083 - DNA, 20 bp, synthetic construct
  misc_feature 1..20: note = Artificial sequence related to HLA knockouts in cell therapy
  source 1..20: mol_type = other DNA
cgtcctgctactctcggggg

SEQ ID NO: 19084 - DNA, 20 bp, synthetic construct
  misc_feature 1..20: note = Artificial sequence related to HLA knockouts in cell therapy
  source 1..20: mol_type = other DNA
gtcctgctactctcgggggc

SEQ ID NO: 19085 - DNA, 20 bp, synthetic construct
  misc_feature 1..20: note = Artificial sequence related to HLA knockouts in cell therapy
  source 1..20: mol_type = other DNA
tcctgctactctcgggggct

SEQ ID NO: 19086 - DNA, 20 bp, synthetic construct
  misc_feature 1..20: note = Artificial sequence related to HLA knockouts in cell therapy
  source 1..20: mol_type = other DNA
cctgctactctcgggggctc

SEQ ID NO: 19087 - DNA, 20 bp, synthetic construct
  misc_feature 1..20: note = Artificial sequence related to HLA knockouts in cell therapy
  source 1..20: mol_type = other DNA
ctgctactctcgggggctct

SEQ ID NO: 19088 - DNA, 20 bp, synthetic construct
  misc_feature 1..20: note = Artificial sequence related to HLA knockouts in cell therapy
  source 1..20: mol_type = other DNA
tgctactctcgggggctctg

SEQ ID NO: 19089 - DNA, 20 bp, synthetic construct
  misc_feature 1..20: note = Artificial sequence related to HLA knockouts in cell therapy
  source 1..20: mol_type = other DNA
gctactctcgggggctctgg

SEQ ID NO: 19090 - DNA, 20 bp, synthetic construct
  misc_feature 1..20: note = Artificial sequence related to HLA knockouts in cell therapy
  source 1..20: mol_type = other DNA
ctactctcgggggctctggc

SEQ ID NO: 19091 - DNA, 20 bp, synthetic construct
  misc_feature 1..20: note = Artificial sequence related to HLA knockouts in cell therapy
  source 1..20: mol_type = other DNA
tactctcgggggctctggcc

SEQ ID NO: 19092 - DNA, 20 bp, synthetic construct
  misc_feature 1..20: note = Artificial sequence related to HLA knockouts in cell therapy
  source 1..20: mol_type = other DNA
actctcgggggctctggccc

SEQ ID NO: 19093 - DNA, 20 bp, synthetic construct
  misc_feature 1..20: note = Artificial sequence related to HLA knockouts in cell therapy
  source 1..20: mol_type = other DNA
ctctcgggggctctggccct

SEQ ID NO: 19094 - DNA, 20 bp, synthetic construct
  misc_feature 1..20: note = Artificial sequence related to HLA knockouts in cell therapy
  source 1..20: mol_type = other DNA
tctcgggggctctggccctg

SEQ ID NO: 19095 - DNA, 20 bp, synthetic construct
  misc_feature 1..20: note = Artificial sequence related to HLA knockouts in cell therapy
  source 1..20: mol_type = other DNA
ctcgggggctctggccctga

SEQ ID NO: 19096 - DNA, 20 bp, synthetic construct
  misc_feature 1..20: note = Artificial sequence related to HLA knockouts in cell therapy
  source 1..20: mol_type = other DNA
tcgggggctctggccctgac

SEQ ID NO: 19097 - DNA, 20 bp, synthetic construct
  misc_feature 1..20: note = Artificial sequence related to HLA knockouts in cell therapy
  source 1..20: mol_type = other DNA
cgggggctctggccctgacc

SEQ ID NO: 19098 - DNA, 20 bp, synthetic construct
  misc_feature 1..20: note = Artificial sequence related to HLA knockouts in cell therapy
  source 1..20: mol_type = other DNA
gggggctctggccctgaccc

SEQ ID NO: 19099 - DNA, 20 bp, synthetic construct
  misc_feature 1..20: note = Artificial sequence related to HLA knockouts in cell therapy
  source 1..20: mol_type = other DNA
ggggctctggccctgaccca

SEQ ID NO: 19100 - DNA, 20 bp, synthetic construct
  misc_feature 1..20: note = Artificial sequence related to HLA knockouts in cell therapy
  source 1..20: mol_type = other DNA
gggctctggccctgacccag

SEQ ID NO: 19101 - DNA, 20 bp, synthetic construct
  misc_feature 1..20: note = Artificial sequence related to HLA knockouts in cell therapy
  source 1..20: mol_type = other DNA
ggctctggccctgacccaga

SEQ ID NO: 19102 - DNA, 20 bp, synthetic construct
  misc_feature 1..20: note = Artificial sequence related to HLA knockouts in cell therapy
  source 1..20: mol_type = other DNA
gctctggccctgacccagac

SEQ ID NO: 19103 - DNA, 20 bp, synthetic construct
  misc_feature 1..20: note = Artificial sequence related to HLA knockouts in cell therapy
  source 1..20: mol_type = other DNA
ctctggccctgacccagacc

SEQ ID NO: 19104 - DNA, 20 bp, synthetic construct
  misc_feature 1..20: note = Artificial sequence related to HLA knockouts in cell therapy
  source 1..20: mol_type = other DNA
tctggccctgacccagacct

SEQ ID NO: 19105 - DNA, 20 bp, synthetic construct
  misc_feature 1..20: note = Artificial sequence related to HLA knockouts in cell therapy
  source 1..20: mol_type = other DNA
ctggccctgacccagacctg

SEQ ID NO: 19106 - DNA, 20 bp, synthetic construct
  misc_feature 1..20: note = Artificial sequence related to HLA knockouts in cell therapy
  source 1..20: mol_type = other DNA
tggccctgacccagacctgg

SEQ ID NO: 19107 - DNA, 20 bp, synthetic construct
  misc_feature 1..20: note = Artificial sequence related to HLA knockouts in cell therapy
  source 1..20: mol_type = other DNA
ggccctgacccagacctggg

SEQ ID NO: 19108 - DNA, 20 bp, synthetic construct
  misc_feature 1..20: note = Artificial sequence related to HLA knockouts in cell therapy
  source 1..20: mol_type = other DNA
gccctgacccagacctgggc

SEQ ID NO: 19109 - DNA, 20 bp, synthetic construct
  misc_feature 1..20: note = Artificial sequence related to HLA knockouts in cell therapy
  source 1..20: mol_type = other DNA
ccctgacccagacctgggcg

SEQ ID NO: 19110 - DNA, 20 bp, synthetic construct
  misc_feature 1..20: note = Artificial sequence related to HLA knockouts in cell therapy
  source 1..20: mol_type = other DNA
cctgacccagacctgggcgg

SEQ ID NO: 19111 - DNA, 20 bp, synthetic construct
  misc_feature 1..20: note = Artificial sequence related to HLA knockouts in cell therapy
  source 1..20: mol_type = other DNA
ctgacccagacctgggcggg

SEQ ID NO: 19112 - DNA, 20 bp, synthetic construct
  misc_feature 1..20: note = Artificial sequence related to HLA knockouts in cell therapy
  source 1..20: mol_type = other DNA
tgacccagacctgggcgggc

SEQ ID NO: 19113 - DNA, 20 bp, synthetic construct
  misc_feature 1..20: note = Artificial sequence related to HLA knockouts in cell therapy
  source 1..20: mol_type = other DNA
gacccagacctgggcgggct

SEQ ID NO: 19114 - DNA, 20 bp, synthetic construct
  misc_feature 1..20: note = Artificial sequence related to HLA knockouts in cell therapy
  source 1..20: mol_type = other DNA
acccagacctgggcgggctc

SEQ ID NO: 19115 - DNA, 20 bp, synthetic construct
  misc_feature 1..20: note = Artificial sequence related to HLA knockouts in cell therapy
  source 1..20: mol_type = other DNA
cccagacctgggcgggctct

SEQ ID NO: 19116 - DNA, 20 bp, synthetic construct
  misc_feature 1..20: note = Artificial sequence related to HLA knockouts in cell therapy
  source 1..20: mol_type = other DNA
ccagacctgggcgggctctc

SEQ ID NO: 19117 - DNA, 20 bp, synthetic construct
  misc_feature 1..20: note = Artificial sequence related to HLA knockouts in cell therapy
  source 1..20: mol_type = other DNA
cagacctgggcgggctctca

SEQ ID NO: 19118 - DNA, 20 bp, synthetic construct
  misc_feature 1..20: note = Artificial sequence related to HLA knockouts in cell therapy
  source 1..20: mol_type = other DNA
agacctgggcgggctctcac

SEQ ID NO: 19119 - DNA, 20 bp, synthetic construct
  misc_feature 1..20: note = Artificial sequence related to HLA knockouts in cell therapy
  source 1..20: mol_type = other DNA
gacctgggcgggctctcact

SEQ ID NO: 19120 - DNA, 20 bp, synthetic construct
  misc_feature 1..20: note = Artificial sequence related to HLA knockouts in cell therapy
  source 1..20: mol_type = other DNA
acctgggcgggctctcactc

SEQ ID NO: 19121 - DNA, 20 bp, synthetic construct
  misc_feature 1..20: note = Artificial sequence related to HLA knockouts in cell therapy
  source 1..20: mol_type = other DNA
cctgggcgggctctcactcc

SEQ ID NO: 19122 - DNA, 20 bp, synthetic construct
  misc_feature 1..20: note = Artificial sequence related to HLA knockouts in cell therapy
  source 1..20: mol_type = other DNA
ctgggcgggctctcactcca

SEQ ID NO: 19123 - DNA, 20 bp, synthetic construct
  misc_feature 1..20: note = Artificial sequence related to HLA knockouts in cell therapy
  source 1..20: mol_type = other DNA
tgggcgggctctcactccat

SEQ ID NO: 19124 - DNA, 20 bp, synthetic construct
  misc_feature 1..20: note = Artificial sequence related to HLA knockouts in cell therapy
  source 1..20: mol_type = other DNA
gggcgggctctcactccatg

SEQ ID NO: 19125 - DNA, 20 bp, synthetic construct
  misc_feature 1..20: note = Artificial sequence related to HLA knockouts in cell therapy
  source 1..20: mol_type = other DNA
ggcgggctctcactccatga

SEQ ID NO: 19126 - DNA, 20 bp, synthetic construct
  misc_feature 1..20: note = Artificial sequence related to HLA knockouts in cell therapy
  source 1..20: mol_type = other DNA
gcgggctctcactccatgag

SEQ ID NO: 19127 - DNA, 20 bp, synthetic construct
  misc_feature 1..20: note = Artificial sequence related to HLA knockouts in cell therapy
  source 1..20: mol_type = other DNA
cgggctctcactccatgagg

SEQ ID NO: 19128 - DNA, 20 bp, synthetic construct
  misc_feature 1..20: note = Artificial sequence related to HLA knockouts in cell therapy
  source 1..20: mol_type = other DNA
gggctctcactccatgaggt

SEQ ID NO: 19129 - DNA, 20 bp, synthetic construct
  misc_feature 1..20: note = Artificial sequence related to HLA knockouts in cell therapy
  source 1..20: mol_type = other DNA
tcttcacatccgtgtcccgg

SEQ ID NO: 19130 - DNA, 20 bp, synthetic construct
  misc_feature 1..20: note = Artificial sequence related to HLA knockouts in cell therapy
  source 1..20: mol_type = other DNA
cttcacatccgtgtcccggc

SEQ ID NO: 19131 - DNA, 20 bp, synthetic construct
  misc_feature 1..20: note = Artificial sequence related to HLA knockouts in cell therapy
  source 1..20: mol_type = other DNA
ttcacatccgtgtcccggcc

SEQ ID NO: 19132 - DNA, 20 bp, synthetic construct
  misc_feature 1..20: note = Artificial sequence related to HLA knockouts in cell therapy
  source 1..20: mol_type = other DNA
tcacatccgtgtcccggccc

SEQ ID NO: 19133 - DNA, 20 bp, synthetic construct
  misc_feature 1..20: note = Artificial sequence related to HLA knockouts in cell therapy
  source 1..20: mol_type = other DNA
cacatccgtgtcccggcccg

SEQ ID NO: 19134 - DNA, 20 bp, synthetic construct
  misc_feature 1..20: note = Artificial sequence related to HLA knockouts in cell therapy
  source 1..20: mol_type = other DNA
acatccgtgtcccggcccgg

SEQ ID NO: 19135 - DNA, 20 bp, synthetic construct
  misc_feature 1..20: note = Artificial sequence related to HLA knockouts in cell therapy
  source 1..20: mol_type = other DNA
catccgtgtcccggcccggc

SEQ ID NO: 19136 - DNA, 20 bp, synthetic construct
  misc_feature 1..20: note = Artificial sequence related to HLA knockouts in cell therapy
  source 1..20: mol_type = other DNA
atccgtgtcccggcccggcc

SEQ ID NO: 19137 - DNA, 20 bp, synthetic construct
  misc_feature 1..20: note = Artificial sequence related to HLA knockouts in cell therapy
  source 1..20: mol_type = other DNA
tccgtgtcccggcccggccg

SEQ ID NO: 19138 - DNA, 20 bp, synthetic construct
  misc_feature 1..20: note = Artificial sequence related to HLA knockouts in cell therapy
  source 1..20: mol_type = other DNA
ccgtgtcccggcccggccgc

SEQ ID NO: 19139 - DNA, 20 bp, synthetic construct
  misc_feature 1..20: note = Artificial sequence related to HLA knockouts in cell therapy
  source 1..20: mol_type = other DNA
cgtgtcccggcccggccgcg

SEQ ID NO: 19140 - DNA, 20 bp, synthetic construct
  misc_feature 1..20: note = Artificial sequence related to HLA knockouts in cell therapy
  source 1..20: mol_type = other DNA
gtgtcccggcccggccgcgg

SEQ ID NO: 19141 - DNA, 20 bp, synthetic construct
  misc_feature 1..20: note = Artificial sequence related to HLA knockouts in cell therapy
  source 1..20: mol_type = other DNA
tgtcccggcccggccgcggg

SEQ ID NO: 19142 - DNA, 20 bp, synthetic construct
  misc_feature 1..20: note = Artificial sequence related to HLA knockouts in cell therapy
  source 1..20: mol_type = other DNA
gtcccggcccggccgcgggg

SEQ ID NO: 19143 - DNA, 20 bp, synthetic construct
  misc_feature 1..20: note = Artificial sequence related to HLA knockouts in cell therapy
  source 1..20: mol_type = other DNA
tcccggcccggccgcgggga

SEQ ID NO: 19144 - DNA, 20 bp, synthetic construct
  misc_feature 1..20: note = Artificial sequence related to HLA knockouts in cell therapy
  source 1..20: mol_type = other DNA
cccggcccggccgcggggag

SEQ ID NO: 19145 - DNA, 20 bp, synthetic construct
  misc_feature 1..20: note = Artificial sequence related to HLA knockouts in cell therapy
  source 1..20: mol_type = other DNA
ccggcccggccgcggggagc

SEQ ID NO: 19146 - DNA, 20 bp, synthetic construct
  misc_feature 1..20: note = Artificial sequence related to HLA knockouts in cell therapy
  source 1..20: mol_type = other DNA
cggcccggccgcggggagcc

SEQ ID NO: 19147 - DNA, 20 bp, synthetic construct
  misc_feature 1..20: note = Artificial sequence related to HLA knockouts in cell therapy
  source 1..20: mol_type = other DNA
ggcccggccgcggggagccc

SEQ ID NO: 19148 - DNA, 20 bp, synthetic construct
  misc_feature 1..20: note = Artificial sequence related to HLA knockouts in cell therapy
  source 1..20: mol_type = other DNA
gcccggccgcggggagcccc

SEQ ID NO: 19149 - DNA, 20 bp, synthetic construct
  misc_feature 1..20: note = Artificial sequence related to HLA knockouts in cell therapy
  source 1..20: mol_type = other DNA
cccggccgcggggagccccg

SEQ ID NO: 19150 - DNA, 20 bp, synthetic construct
  misc_feature 1..20: note = Artificial sequence related to HLA knockouts in cell therapy
  source 1..20: mol_type = other DNA
ccggccgcggggagccccgc

SEQ ID NO: 19151 - DNA, 20 bp, synthetic construct
  misc_feature 1..20: note = Artificial sequence related to HLA knockouts in cell therapy
  source 1..20: mol_type = other DNA
cggccgcggggagccccgct

SEQ ID NO: 19152 - DNA, 20 bp, synthetic construct
  misc_feature 1..20: note = Artificial sequence related to HLA knockouts in cell therapy
  source 1..20: mol_type = other DNA
ggccgcggggagccccgctt

SEQ ID NO: 19153 - DNA, 20 bp, synthetic construct
  misc_feature 1..20: note = Artificial sequence related to HLA knockouts in cell therapy
  source 1..20: mol_type = other DNA
gccgcggggagccccgcttc

SEQ ID NO: 19154 - DNA, 20 bp, synthetic construct
  misc_feature 1..20: note = Artificial sequence related to HLA knockouts in cell therapy
  source 1..20: mol_type = other DNA
ccgcggggagccccgcttca

SEQ ID NO: 19155 - DNA, 20 bp, synthetic construct
  misc_feature 1..20: note = Artificial sequence related to HLA knockouts in cell therapy
  source 1..20: mol_type = other DNA
cgcggggagccccgcttcat

SEQ ID NO: 19156 - DNA, 20 bp, synthetic construct
  misc_feature 1..20: note = Artificial sequence related to HLA knockouts in cell therapy
  source 1..20: mol_type = other DNA
gcggggagccccgcttcatc

SEQ ID NO: 19157 - DNA, 20 bp, synthetic construct
  misc_feature 1..20: note = Artificial sequence related to HLA knockouts in cell therapy
  source 1..20: mol_type = other DNA
cggggagccccgcttcatcg

SEQ ID NO: 19158 - DNA, 20 bp, synthetic construct
  misc_feature 1..20: note = Artificial sequence related to HLA knockouts in cell therapy
  source 1..20: mol_type = other DNA
ggggagccccgcttcatcgc

SEQ ID NO: 19159 - DNA, 20 bp, synthetic construct
  misc_feature 1..20: note = Artificial sequence related to HLA knockouts in cell therapy
  source 1..20: mol_type = other DNA
gggagccccgcttcatcgca

SEQ ID NO: 19160 - DNA, 20 bp, synthetic construct
  misc_feature 1..20: note = Artificial sequence related to HLA knockouts in cell therapy
  source 1..20: mol_type = other DNA
ggagccccgcttcatcgcag

SEQ ID NO: 19161 - DNA, 20 bp, synthetic construct
  misc_feature 1..20: note = Artificial sequence related to HLA knockouts in cell therapy
  source 1..20: mol_type = other DNA
gagccccgcttcatcgcagt

SEQ ID NO: 19162 - DNA, 20 bp, synthetic construct
  misc_feature 1..20: note = Artificial sequence related to HLA knockouts in cell therapy
  source 1..20: mol_type = other DNA
agccccgcttcatcgcagtg

SEQ ID NO: 19163 - DNA, 20 bp, synthetic construct
  misc_feature 1..20: note = Artificial sequence related to HLA knockouts in cell therapy
  source 1..20: mol_type = other DNA
gccccgcttcatcgcagtgg

SEQ ID NO: 19164 - DNA, 20 bp, synthetic construct
  misc_feature 1..20: note = Artificial sequence related to HLA knockouts in cell therapy
  source 1..20: mol_type = other DNA
ccccgcttcatcgcagtggg

SEQ ID NO: 19165 - DNA, 20 bp, synthetic construct
  misc_feature 1..20: note = Artificial sequence related to HLA knockouts in cell therapy
  source 1..20: mol_type = other DNA
cccgcttcatcgcagtgggc

SEQ ID NO: 19166 - DNA, 20 bp, synthetic construct
  misc_feature 1..20: note = Artificial sequence related to HLA knockouts in cell therapy
  source 1..20: mol_type = other DNA
ccgcttcatcgcagtgggct

SEQ ID NO: 19167 - DNA, 20 bp, synthetic construct
  misc_feature 1..20: note = Artificial sequence related to HLA knockouts in cell therapy
  source 1..20: mol_type = other DNA
cgcttcatcgcagtgggcta

SEQ ID NO: 19168 - DNA, 20 bp, synthetic construct
  misc_feature 1..20: note = Artificial sequence related to HLA knockouts in cell therapy
  source 1..20: mol_type = other DNA
gcttcatcgcagtgggctac

SEQ ID NO: 19169 - DNA, 20 bp, synthetic construct
  misc_feature 1..20: note = Artificial sequence related to HLA knockouts in cell therapy
  source 1..20: mol_type = other DNA
cttcatcgcagtgggctacg

SEQ ID NO: 19170 - DNA, 20 bp, synthetic construct
  misc_feature 1..20: note = Artificial sequence related to HLA knockouts in cell therapy
  source 1..20: mol_type = other DNA
tcatcgcagtgggctacgtg

SEQ ID NO: 19171 - DNA, 20 bp, synthetic construct
  misc_feature 1..20: note = Artificial sequence related to HLA knockouts in cell therapy
  source 1..20: mol_type = other DNA
catcgcagtgggctacgtgg

SEQ ID NO: 19172 - DNA, 20 bp, synthetic construct
  misc_feature 1..20: note = Artificial sequence related to HLA knockouts in cell therapy
  source 1..20: mol_type = other DNA
atcgcagtgggctacgtgga

SEQ ID NO: 19173 - DNA, 20 bp, synthetic construct
  misc_feature 1..20: note = Artificial sequence related to HLA knockouts in cell therapy
  source 1..20: mol_type = other DNA
tcgcagtgggctacgtggac

SEQ ID NO: 19174 - DNA, 20 bp, synthetic construct
  misc_feature 1..20: note = Artificial sequence related to HLA knockouts in cell therapy
  source 1..20: mol_type = other DNA
cgcagtgggctacgtggacg

SEQ ID NO: 19175 - DNA, 20 bp, synthetic construct
  misc_feature 1..20: note = Artificial sequence related to HLA knockouts in cell therapy
  source 1..20: mol_type = other DNA
gcagtgggctacgtggacga

SEQ ID NO: 19176 - DNA, 20 bp, synthetic construct
  misc_feature 1..20: note = Artificial sequence related to HLA knockouts in cell therapy
  source 1..20: mol_type = other DNA
cagtgggctacgtggacgac

SEQ ID NO: 19177 - DNA, 20 bp, synthetic construct
  misc_feature 1..20: note = Artificial sequence related to HLA knockouts in cell therapy
  source 1..20: mol_type = other DNA
agtgggctacgtggacgaca

SEQ ID NO: 19178 - DNA, 20 bp, synthetic construct
  misc_feature 1..20: note = Artificial sequence related to HLA knockouts in cell therapy
  source 1..20: mol_type = other DNA
gtgggctacgtggacgacac

SEQ ID NO: 19179 - DNA, 20 bp, synthetic construct
  misc_feature 1..20: note = Artificial sequence related to HLA knockouts in cell therapy
  source 1..20: mol_type = other DNA
tgggctacgtggacgacacg

SEQ ID NO: 19180 - DNA, 20 bp, synthetic construct
  misc_feature 1..20: note = Artificial sequence related to HLA knockouts in cell therapy
  source 1..20: mol_type = other DNA
gggctacgtggacgacacgc

SEQ ID NO: 19181 - DNA, 20 bp, synthetic construct
  misc_feature 1..20: note = Artificial sequence related to HLA knockouts in cell therapy
  source 1..20: mol_type = other DNA
ggctacgtggacgacacgca

SEQ ID NO: 19182 - DNA, 20 bp, synthetic construct
  misc_feature 1..20: note = Artificial sequence related to HLA knockouts in cell therapy
  source 1..20: mol_type = other DNA
gctacgtggacgacacgcag

SEQ ID NO: 19183 - DNA, 20 bp, synthetic construct
  misc_feature 1..20: note = Artificial sequence related to HLA knockouts in cell therapy
  source 1..20: mol_type = other DNA
ctacgtggacgacacgcagt

SEQ ID NO: 19184 - DNA, 20 bp, synthetic construct
  misc_feature 1..20: note = Artificial sequence related to HLA knockouts in cell therapy
  source 1..20: mol_type = other DNA
acgtggacgacacgcagttc

SEQ ID NO: 19185 - DNA, 20 bp, synthetic construct
  misc_feature 1..20: note = Artificial sequence related to HLA knockouts in cell therapy
  source 1..20: mol_type = other DNA
cgtggacgacacgcagttcg

SEQ ID NO: 19186 - DNA, 20 bp, synthetic construct
  misc_feature 1..20: note = Artificial sequence related to HLA knockouts in cell therapy
  source 1..20: mol_type = other DNA
gtggacgacacgcagttcgt

SEQ ID NO: 19187 - DNA, 20 bp, synthetic construct
  misc_feature 1..20: note = Artificial sequence related to HLA knockouts in cell therapy
  source 1..20: mol_type = other DNA
tggacgacacgcagttcgtg

SEQ ID NO: 19188 - DNA, 20 bp, synthetic construct
  misc_feature 1..20: note = Artificial sequence related to HLA knockouts in cell therapy
  source 1..20: mol_type = other DNA
ggacgacacgcagttcgtgc

SEQ ID NO: 19189 - DNA, 20 bp, synthetic construct
  misc_feature 1..20: note = Artificial sequence related to HLA knockouts in cell therapy
  source 1..20: mol_type = other DNA
gacgacacgcagttcgtgcg

SEQ ID NO: 19190 - DNA, 20 bp, synthetic construct
  misc_feature 1..20: note = Artificial sequence related to HLA knockouts in cell therapy
  source 1..20: mol_type = other DNA
acgacacgcagttcgtgcgg

SEQ ID NO: 19191 - DNA, 20 bp, synthetic construct
  misc_feature 1..20: note = Artificial sequence related to HLA knockouts in cell therapy
  source 1..20: mol_type = other DNA
cgacacgcagttcgtgcggt

SEQ ID NO: 19192 - DNA, 20 bp, synthetic construct
  misc_feature 1..20: note = Artificial sequence related to HLA knockouts in cell therapy
  source 1..20: mol_type = other DNA
gacacgcagttcgtgcggtt

SEQ ID NO: 19193 - DNA, 20 bp, synthetic construct
  misc_feature 1..20: note = Artificial sequence related to HLA knockouts in cell therapy
  source 1..20: mol_type = other DNA
acacgcagttcgtgcggttc

SEQ ID NO: 19194 - DNA, 20 bp, synthetic construct
  misc_feature 1..20: note = Artificial sequence related to HLA knockouts in cell therapy
  source 1..20: mol_type = other DNA
cacgcagttcgtgcggttcg

SEQ ID NO: 19195 - DNA, 20 bp, synthetic construct
  misc_feature 1..20: note = Artificial sequence related to HLA knockouts in cell therapy
  source 1..20: mol_type = other DNA
acgcagttcgtgcggttcga

SEQ ID NO: 19196 - DNA, 20 bp, synthetic construct
  misc_feature 1..20: note = Artificial sequence related to HLA knockouts in cell therapy
  source 1..20: mol_type = other DNA
cgcagttcgtgcggttcgac

SEQ ID NO: 19197 - DNA, 20 bp, synthetic construct
  misc_feature 1..20: note = Artificial sequence related to HLA knockouts in cell therapy
  source 1..20: mol_type = other DNA
gcagttcgtgcggttcgaca

SEQ ID NO: 19198 - DNA, 20 bp, synthetic construct
  misc_feature 1..20: note = Artificial sequence related to HLA knockouts in cell therapy
  source 1..20: mol_type = other DNA
cagttcgtgcggttcgacag

SEQ ID NO: 19199 - DNA, 20 bp, synthetic construct
  misc_feature 1..20: note = Artificial sequence related to HLA knockouts in cell therapy
  source 1..20: mol_type = other DNA
agttcgtgcggttcgacagc

SEQ ID NO: 19200 - DNA, 20 bp, synthetic construct
  misc_feature 1..20: note = Artificial sequence related to HLA knockouts in cell therapy
  source 1..20: mol_type = other DNA
gttcgtgcggttcgacagcg

SEQ ID NO: 19201 - DNA, 20 bp, synthetic construct
  misc_feature 1..20: note = Artificial sequence related to HLA knockouts in cell therapy
  source 1..20: mol_type = other DNA
ttcgtgcggttcgacagcga

SEQ ID NO: 19202 - DNA, 20 bp, synthetic construct
  misc_feature 1..20: note = Artificial sequence related to HLA knockouts in cell therapy
  source 1..20: mol_type = other DNA
tcgtgcggttcgacagcgac

SEQ ID NO: 19203 - DNA, 20 bp, synthetic construct
  misc_feature 1..20: note = Artificial sequence related to HLA knockouts in cell therapy
  source 1..20: mol_type = other DNA
cgtgcggttcgacagcgacg

SEQ ID NO: 19204 - DNA, 20 bp, synthetic construct
  misc_feature 1..20: note = Artificial sequence related to HLA knockouts in cell therapy
  source 1..20: mol_type = other DNA
gtgcggttcgacagcgacgc

SEQ ID NO: 19205 - DNA, 20 bp, synthetic construct
  misc_feature 1..20: note = Artificial sequence related to HLA knockouts in cell therapy
  source 1..20: mol_type = other DNA
tgcggttcgacagcgacgcc

SEQ ID NO: 19206 - DNA, 20 bp, synthetic construct
  misc_feature 1..20: note = Artificial sequence related to HLA knockouts in cell therapy
  source 1..20: mol_type = other DNA
gcggttcgacagcgacgccg

SEQ ID NO: 19207 - DNA, 20 bp, synthetic construct
  misc_feature 1..20: note = Artificial sequence related to HLA knockouts in cell therapy
  source 1..20: mol_type = other DNA
cggttcgacagcgacgccgc

SEQ ID NO: 19208 - DNA, 20 bp, synthetic construct
  misc_feature 1..20: note = Artificial sequence related to HLA knockouts in cell therapy
  source 1..20: mol_type = other DNA
ggttcgacagcgacgccgcg

SEQ ID NO: 19209 - DNA, 20 bp, synthetic construct
  misc_feature 1..20: note = Artificial sequence related to HLA knockouts in cell therapy
  source 1..20: mol_type = other DNA
gttcgacagcgacgccgcga

SEQ ID NO: 19210 - DNA, 20 bp, synthetic construct
  misc_feature 1..20: note = Artificial sequence related to HLA knockouts in cell therapy
  source 1..20: mol_type = other DNA
ttcgacagcgacgccgcgag

SEQ ID NO: 19211 - DNA, 20 bp, synthetic construct
  misc_feature 1..20: note = Artificial sequence related to HLA knockouts in cell therapy
  source 1..20: mol_type = other DNA
tcgacagcgacgccgcgagc

SEQ ID NO: 19212 - DNA, 20 bp, synthetic construct
  misc_feature 1..20: note = Artificial sequence related to HLA knockouts in cell therapy
  source 1..20: mol_type = other DNA
cgacagcgacgccgcgagcc

SEQ ID NO: 19213 - DNA, 20 bp, synthetic construct
  misc_feature 1..20: note = Artificial sequence related to HLA knockouts in cell therapy
  source 1..20: mol_type = other DNA
gacagcgacgccgcgagcca

SEQ ID NO: 19214 - DNA, 20 bp, synthetic construct
  misc_feature 1..20: note = Artificial sequence related to HLA knockouts in cell therapy
  source 1..20: mol_type = other DNA
acagcgacgccgcgagccag

SEQ ID NO: 19215 - DNA, 20 bp, synthetic construct
  misc_feature 1..20: note = Artificial sequence related to HLA knockouts in cell therapy
  source 1..20: mol_type = other DNA
cagcgacgccgcgagccaga

SEQ ID NO: 19216 - DNA, 20 bp, synthetic construct
  misc_feature 1..20: note = Artificial sequence related to HLA knockouts in cell therapy
  source 1..20: mol_type = other DNA
agcgacgccgcgagccagag

SEQ ID NO: 19217 - DNA, 20 bp, synthetic construct
  misc_feature 1..20: note = Artificial sequence related to HLA knockouts in cell therapy
  source 1..20: mol_type = other DNA
gcgacgccgcgagccagagg

SEQ ID NO: 19218 - DNA, 20 bp, synthetic construct
  misc_feature 1..20: note = Artificial sequence related to HLA knockouts in cell therapy
  source 1..20: mol_type = other DNA
cgacgccgcgagccagagga

SEQ ID NO: 19219 - DNA, 20 bp, synthetic construct
  misc_feature 1..20: note = Artificial sequence related to HLA knockouts in cell therapy
  source 1..20: mol_type = other DNA
gacgccgcgagccagaggat

SEQ ID NO: 19220 - DNA, 20 bp, synthetic construct
  misc_feature 1..20: note = Artificial sequence related to HLA knockouts in cell therapy
  source 1..20: mol_type = other DNA
acgccgcgagccagaggatg

SEQ ID NO: 19221 - DNA, 20 bp, synthetic construct
  misc_feature 1..20: note = Artificial sequence related to HLA knockouts in cell therapy
  source 1..20: mol_type = other DNA
cgccgcgagccagaggatgg

SEQ ID NO: 19222 - DNA, 20 bp, synthetic construct
  misc_feature 1..20: note = Artificial sequence related to HLA knockouts in cell therapy
  source 1..20: mol_type = other DNA
gccgcgagccagaggatgga

SEQ ID NO: 19223 - DNA, 20 bp, synthetic construct
  misc_feature 1..20: note = Artificial sequence related to HLA knockouts in cell therapy
  source 1..20: mol_type = other DNA
ccgcgagccagaggatggag

SEQ ID NO: 19224 - DNA, 20 bp, synthetic construct
  misc_feature 1..20: note = Artificial sequence related to HLA knockouts in cell therapy
  source 1..20: mol_type = other DNA
cgcgagccagaggatggagc

SEQ ID NO: 19225 - DNA, 20 bp, synthetic construct
  misc_feature 1..20: note = Artificial sequence related to HLA knockouts in cell therapy
  source 1..20: mol_type = other DNA
gcgagccagaggatggagcc

SEQ ID NO: 19226 - DNA, 20 bp, synthetic construct
  misc_feature 1..20: note = Artificial sequence related to HLA knockouts in cell therapy
  source 1..20: mol_type = other DNA
cgagccagaggatggagccg

SEQ ID NO: 19227 - DNA, 20 bp, synthetic construct
  misc_feature 1..20: note = Artificial sequence related to HLA knockouts in cell therapy
  source 1..20: mol_type = other DNA
gagccagaggatggagccgc

SEQ ID NO: 19228 - DNA, 20 bp, synthetic construct
  misc_feature 1..20: note = Artificial sequence related to HLA knockouts in cell therapy
  source 1..20: mol_type = other DNA
agccagaggatggagccgcg

SEQ ID NO: 19229 - DNA, 20 bp, synthetic construct
  misc_feature 1..20: note = Artificial sequence related to HLA knockouts in cell therapy
  source 1..20: mol_type = other DNA
gccagaggatggagccgcgg

SEQ ID NO: 19230 - DNA, 20 bp, synthetic construct
  misc_feature 1..20: note = Artificial sequence related to HLA knockouts in cell therapy
  source 1..20: mol_type = other DNA
ccagaggatggagccgcggg

SEQ ID NO: 19231 - DNA, 20 bp, synthetic construct
  misc_feature 1..20: note = Artificial sequence related to HLA knockouts in cell therapy
  source 1..20: mol_type = other DNA
cagaggatggagccgcgggc

SEQ ID NO: 19232 - DNA, 20 bp, synthetic construct
  misc_feature 1..20: note = Artificial sequence related to HLA knockouts in cell therapy
  source 1..20: mol_type = other DNA
agaggatggagccgcgggcg

SEQ ID NO: 19233 - DNA, 20 bp, synthetic construct
  misc_feature 1..20: note = Artificial sequence related to HLA knockouts in cell therapy
  source 1..20: mol_type = other DNA
gaggatggagccgcgggcgc

SEQ ID NO: 19234 - DNA, 20 bp, synthetic construct
  misc_feature 1..20: note = Artificial sequence related to HLA knockouts in cell therapy
  source 1..20: mol_type = other DNA
aggatggagccgcgggcgcc

SEQ ID NO: 19235 - DNA, 20 bp, synthetic construct
  misc_feature 1..20: note = Artificial sequence related to HLA knockouts in cell therapy
  source 1..20: mol_type = other DNA
ggatggagccgcgggcgccg

SEQ ID NO: 19236 - DNA, 20 bp, synthetic construct
  misc_feature 1..20: note = Artificial sequence related to HLA knockouts in cell therapy
  source 1..20: mol_type = other DNA
gatggagccgcgggcgccgt

SEQ ID NO: 19237 - DNA, 20 bp, synthetic construct
  misc_feature 1..20: note = Artificial sequence related to HLA knockouts in cell therapy
  source 1..20: mol_type = other DNA
atggagccgcgggcgccgtg

SEQ ID NO: 19238 - DNA, 20 bp, synthetic construct
  misc_feature 1..20: note = Artificial sequence related to HLA knockouts in cell therapy
  source 1..20: mol_type = other DNA
tggagccgcgggcgccgtgg

SEQ ID NO: 19239 - DNA, 20 bp, synthetic construct
  misc_feature 1..20: note = Artificial sequence related to HLA knockouts in cell therapy
  source 1..20: mol_type = other DNA
ggagccgcgggcgccgtgga

SEQ ID NO: 19240 - DNA, 20 bp, synthetic construct
  misc_feature 1..20: note = Artificial sequence related to HLA knockouts in cell therapy
  source 1..20: mol_type = other DNA
gagccgcgggcgccgtggat

SEQ ID NO: 19241 - DNA, 20 bp, synthetic construct
  misc_feature 1..20: note = Artificial sequence related to HLA knockouts in cell therapy
  source 1..20: mol_type = other DNA
agccgcgggcgccgtggata

SEQ ID NO: 19242 - DNA, 20 bp, synthetic construct
  misc_feature 1..20: note = Artificial sequence related to HLA knockouts in cell therapy
  source 1..20: mol_type = other DNA
gccgcgggcgccgtggatag

SEQ ID NO: 19243 - DNA, 20 bp, synthetic construct
  misc_feature 1..20: note = Artificial sequence related to HLA knockouts in cell therapy
  source 1..20: mol_type = other DNA
ccgcgggcgccgtggataga

SEQ ID NO: 19244 - DNA, 20 bp, synthetic construct
  misc_feature 1..20: note = Artificial sequence related to HLA knockouts in cell therapy
  source 1..20: mol_type = other DNA
cgcgggcgccgtggatagag

SEQ ID NO: 19245 - DNA, 20 bp, synthetic construct
  misc_feature 1..20: note = Artificial sequence related to HLA knockouts in cell therapy
  source 1..20: mol_type = other DNA
gcgggcgccgtggatagagc

SEQ ID NO: 19246 - DNA, 20 bp, synthetic construct
  misc_feature 1..20: note = Artificial sequence related to HLA knockouts in cell therapy
  source 1..20: mol_type = other DNA
cgggcgccgtggatagagca

SEQ ID NO: 19247 - DNA, 20 bp, synthetic construct
  misc_feature 1..20: note = Artificial sequence related to HLA knockouts in cell therapy
  source 1..20: mol_type = other DNA
gggcgccgtggatagagcag

SEQ ID NO: 19248 - DNA, 20 bp, synthetic construct
  misc_feature 1..20: note = Artificial sequence related to HLA knockouts in cell therapy
  source 1..20: mol_type = other DNA
ggcgccgtggatagagcagg

SEQ ID NO: 19249 - DNA, 20 bp, synthetic construct
  misc_feature 1..20: note = Artificial sequence related to HLA knockouts in cell therapy
  source 1..20: mol_type = other DNA
gcgccgtggatagagcagga

SEQ ID NO: 19250 - DNA, 20 bp, synthetic construct
  misc_feature 1..20: note = Artificial sequence related to HLA knockouts in cell therapy
  source 1..20: mol_type = other DNA
cgccgtggatagagcaggag

SEQ ID NO: 19251 - DNA, 20 bp, synthetic construct
  misc_feature 1..20: note = Artificial sequence related to HLA knockouts in cell therapy
  source 1..20: mol_type = other DNA
gccgtggatagagcaggagg

SEQ ID NO: 19252 - DNA, 20 bp, synthetic construct
  misc_feature 1..20: note = Artificial sequence related to HLA knockouts in cell therapy
  source 1..20: mol_type = other DNA
ccgtggatagagcaggaggg

SEQ ID NO: 19253 - DNA, 20 bp, synthetic construct
  misc_feature 1..20: note = Artificial sequence related to HLA knockouts in cell therapy
  source 1..20: mol_type = other DNA
cgtggatagagcaggagggt

SEQ ID NO: 19254 - DNA, 20 bp, synthetic construct
  misc_feature 1..20: note = Artificial sequence related to HLA knockouts in cell therapy
  source 1..20: mol_type = other DNA
gtggatagagcaggagggtc

SEQ ID NO: 19255 - DNA, 20 bp, synthetic construct
  misc_feature 1..20: note = Artificial sequence related to HLA knockouts in cell therapy
  source 1..20: mol_type = other DNA
tggatagagcaggagggtcc

SEQ ID NO: 19256 - DNA, 20 bp, synthetic construct
  misc_feature 1..20: note = Artificial sequence related to HLA knockouts in cell therapy
  source 1..20: mol_type = other DNA
ggatagagcaggagggtccg

SEQ ID NO: 19257 - DNA, 20 bp, synthetic construct
  misc_feature 1..20: note = Artificial sequence related to HLA knockouts in cell therapy
  source 1..20: mol_type = other DNA
gatagagcaggagggtccgg

SEQ ID NO: 19258 - DNA, 20 bp, synthetic construct
  misc_feature 1..20: note = Artificial sequence related to HLA knockouts in cell therapy
  source 1..20: mol_type = other DNA
atagagcaggagggtccgga

SEQ ID NO: 19259 - DNA, 20 bp, synthetic construct
  misc_feature 1..20: note = Artificial sequence related to HLA knockouts in cell therapy
  source 1..20: mol_type = other DNA
tagagcaggagggtccggag

SEQ ID NO: 19260 - DNA, 20 bp, synthetic construct
  misc_feature 1..20: note = Artificial sequence related to HLA knockouts in cell therapy
  source 1..20: mol_type = other DNA
agagcaggagggtccggagt

SEQ ID NO: 19261 - DNA, 20 bp, synthetic construct
  misc_feature 1..20: note = Artificial sequence related to HLA knockouts in cell therapy
  source 1..20: mol_type = other DNA
gagcaggagggtccggagta

SEQ ID NO: 19262 - DNA, 20 bp, synthetic construct
  misc_feature 1..20: note = Artificial sequence related to HLA knockouts in cell therapy
  source 1..20: mol_type = other DNA
agcaggagggtccggagtat

SEQ ID NO: 19263 - DNA, 20 bp, synthetic construct
  misc_feature 1..20: note = Artificial sequence related to HLA knockouts in cell therapy
  source 1..20: mol_type = other DNA
caggagggtccggagtattg

SEQ ID NO: 19264 - DNA, 20 bp, synthetic construct
  misc_feature 1..20: note = Artificial sequence related to HLA knockouts in cell therapy
  source 1..20: mol_type = other DNA
aggagggtccggagtattgg

SEQ ID NO: 19265 - DNA, 20 bp, synthetic construct
  misc_feature 1..20: note = Artificial sequence related to HLA knockouts in cell therapy
  source 1..20: mol_type = other DNA
ggagggtccggagtattggg

SEQ ID NO: 19266 - DNA, 20 bp, synthetic construct
  misc_feature 1..20: note = Artificial sequence related to HLA knockouts in cell therapy
  source 1..20: mol_type = other DNA
gagggtccggagtattggga

SEQ ID NO: 19267 - DNA, 20 bp, synthetic construct
  misc_feature 1..20: note = Artificial sequence related to HLA knockouts in cell therapy
  source 1..20: mol_type = other DNA
agggtccggagtattgggac

SEQ ID NO: 19268 - DNA, 20 bp, synthetic construct
  misc_feature 1..20: note = Artificial sequence related to HLA knockouts in cell therapy
  source 1..20: mol_type = other DNA
gggtccggagtattgggacg

SEQ ID NO: 19269 - DNA, 20 bp, synthetic construct
  misc_feature 1..20: note = Artificial sequence related to HLA knockouts in cell therapy
  source 1..20: mol_type = other DNA
ggtccggagtattgggacgg

SEQ ID NO: 19270 - DNA, 20 bp, synthetic construct
  misc_feature 1..20: note = Artificial sequence related to HLA knockouts in cell therapy
  source 1..20: mol_type = other DNA
gtccggagtattgggacggg

SEQ ID NO: 19271 - DNA, 20 bp, synthetic construct
  misc_feature 1..20: note = Artificial sequence related to HLA knockouts in cell therapy
  source 1..20: mol_type = other DNA
tccggagtattgggacgggg

SEQ ID NO: 19272 - DNA, 20 bp, synthetic construct
  misc_feature 1..20: note = Artificial sequence related to HLA knockouts in cell therapy
  source 1..20: mol_type = other DNA
ccggagtattgggacgggga

SEQ ID NO: 19273 - DNA, 20 bp, synthetic construct
  misc_feature 1..20: note = Artificial sequence related to HLA knockouts in cell therapy
  source 1..20: mol_type = other DNA
cggagtattgggacggggag

SEQ ID NO: 19274 - DNA, 20 bp, synthetic construct
  misc_feature 1..20: note = Artificial sequence related to HLA knockouts in cell therapy
  source 1..20: mol_type = other DNA
ggagtattgggacggggaga

SEQ ID NO: 19275 - DNA, 20 bp, synthetic construct
  misc_feature 1..20: note = Artificial sequence related to HLA knockouts in cell therapy
  source 1..20: mol_type = other DNA
gagtattgggacggggagac

SEQ ID NO: 19276 - DNA, 20 bp, synthetic construct
  misc_feature 1..20: note = Artificial sequence related to HLA knockouts in cell therapy
  source 1..20: mol_type = other DNA
gtattgggacggggagacac

SEQ ID NO: 19277 - DNA, 20 bp, synthetic construct
  misc_feature 1..20: note = Artificial sequence related to HLA knockouts in cell therapy
  source 1..20: mol_type = other DNA
tattgggacggggagacacg

SEQ ID NO: 19278 - DNA, 20 bp, synthetic construct
  misc_feature 1..20: note = Artificial sequence related to HLA knockouts in cell therapy
  source 1..20: mol_type = other DNA
attgggacggggagacacgg

SEQ ID NO: 19279 - DNA, 20 bp, synthetic construct
  misc_feature 1..20: note = Artificial sequence related to HLA knockouts in cell therapy
  source 1..20: mol_type = other DNA
ttgggacggggagacacgga

SEQ ID NO: 19280 - DNA, 20 bp, synthetic construct
  misc_feature 1..20: note = Artificial sequence related to HLA knockouts in cell therapy
  source 1..20: mol_type = other DNA
tgggacggggagacacggaa

SEQ ID NO: 19281 - DNA, 20 bp, synthetic construct
  misc_feature 1..20: note = Artificial sequence related to HLA knockouts in cell therapy
  source 1..20: mol_type = other DNA
gggacggggagacacggaaa

SEQ ID NO: 19282 - DNA, 20 bp, synthetic construct
  misc_feature 1..20: note = Artificial sequence related to HLA knockouts in cell therapy
  source 1..20: mol_type = other DNA
gacggggagacacggaaagt

SEQ ID NO: 19283 - DNA, 20 bp, synthetic construct
  misc_feature 1..20: note = Artificial sequence related to HLA knockouts in cell therapy
  source 1..20: mol_type = other DNA
acggggagacacggaaagtg

SEQ ID NO: 19284 - DNA, 20 bp, synthetic construct
  misc_feature 1..20: note = Artificial sequence related to HLA knockouts in cell therapy
  source 1..20: mol_type = other DNA
cggggagacacggaaagtga

SEQ ID NO: 19285 - DNA, 20 bp, synthetic construct
  misc_feature 1..20: note = Artificial sequence related to HLA knockouts in cell therapy
  source 1..20: mol_type = other DNA
gacacggaaagtgaaggccc

SEQ ID NO: 19286 - DNA, 20 bp, synthetic construct
  misc_feature 1..20: note = Artificial sequence related to HLA knockouts in cell therapy
  source 1..20: mol_type = other DNA
cacggaaagtgaaggcccac

SEQ ID NO: 19287 - DNA, 20 bp, synthetic construct
  misc_feature 1..20: note = Artificial sequence related to HLA knockouts in cell therapy
  source 1..20: mol_type = other DNA
cggaaagtgaaggcccactc

SEQ ID NO: 19288 - DNA, 20 bp, synthetic construct
  misc_feature 1..20: note = Artificial sequence related to HLA knockouts in cell therapy
  source 1..20: mol_type = other DNA
gtgaaggcccactcacagac

SEQ ID NO: 19289 - DNA, 20 bp, synthetic construct
  misc_feature 1..20: note = Artificial sequence related to HLA knockouts in cell therapy
  source 1..20: mol_type = other DNA
gaaggcccactcacagactc

SEQ ID NO: 19290 - DNA, 20 bp, synthetic construct
  misc_feature 1..20: note = Artificial sequence related to HLA knockouts in cell therapy
  source 1..20: mol_type = other DNA
aggcccactcacagactcac

SEQ ID NO: 19291 - DNA, 20 bp, synthetic construct
  misc_feature 1..20: note = Artificial sequence related to HLA knockouts in cell therapy
  source 1..20: mol_type = other DNA
ggcccactcacagactcacc

SEQ ID NO: 19292 - DNA, 20 bp, synthetic construct
  misc_feature 1..20: note = Artificial sequence related to HLA knockouts in cell therapy
  source 1..20: mol_type = other DNA
gcccactcacagactcaccg

SEQ ID NO: 19293 - DNA, 20 bp, synthetic construct
  misc_feature 1..20: note = Artificial sequence related to HLA knockouts in cell therapy
  source 1..20: mol_type = other DNA
cccactcacagactcaccga

SEQ ID NO: 19294 - DNA, 20 bp, synthetic construct
  misc_feature 1..20: note = Artificial sequence related to HLA knockouts in cell therapy
  source 1..20: mol_type = other DNA
ccactcacagactcaccgag

SEQ ID NO: 19295 - DNA, 20 bp, synthetic construct
  misc_feature 1..20: note = Artificial sequence related to HLA knockouts in cell therapy
  source 1..20: mol_type = other DNA
ctcacagactcaccgagtgg

SEQ ID NO: 19296 - DNA, 20 bp, synthetic construct
  misc_feature 1..20: note = Artificial sequence related to HLA knockouts in cell therapy
  source 1..20: mol_type = other DNA
cacagactcaccgagtggac

SEQ ID NO: 19297 - DNA, 20 bp, synthetic construct
  misc_feature 1..20: note = Artificial sequence related to HLA knockouts in cell therapy
  source 1..20: mol_type = other DNA
acagactcaccgagtggacc

SEQ ID NO: 19298 - DNA, 20 bp, synthetic construct
  misc_feature 1..20: note = Artificial sequence related to HLA knockouts in cell therapy
  source 1..20: mol_type = other DNA
cagactcaccgagtggacct

SEQ ID NO: 19299 - DNA, 20 bp, synthetic construct
  misc_feature 1..20: note = Artificial sequence related to HLA knockouts in cell therapy
  source 1..20: mol_type = other DNA
agactcaccgagtggacctg

SEQ ID NO: 19300 - DNA, 20 bp, synthetic construct
  misc_feature 1..20: note = Artificial sequence related to HLA knockouts in cell therapy
  source 1..20: mol_type = other DNA
gactcaccgagtggacctgg

SEQ ID NO: 19301 - DNA, 20 bp, synthetic construct
  misc_feature 1..20: note = Artificial sequence related to HLA knockouts in cell therapy
  source 1..20: mol_type = other DNA
actcaccgagtggacctggg

SEQ ID NO: 19302 - DNA, 20 bp, synthetic construct
  misc_feature 1..20: note = Artificial sequence related to HLA knockouts in cell therapy
  source 1..20: mol_type = other DNA
ctcaccgagtggacctgggg

SEQ ID NO: 19303 - DNA, 20 bp, synthetic construct
  misc_feature 1..20: note = Artificial sequence related to HLA knockouts in cell therapy
  source 1..20: mol_type = other DNA
tcaccgagtggacctgggga

SEQ ID NO: 19304 - DNA, 20 bp, synthetic construct
  misc_feature 1..20: note = Artificial sequence related to HLA knockouts in cell therapy
  source 1..20: mol_type = other DNA
caccgagtggacctggggac

SEQ ID NO: 19305 - DNA, 20 bp, synthetic construct
  misc_feature 1..20: note = Artificial sequence related to HLA knockouts in cell therapy
  source 1..20: mol_type = other DNA
accgagtggacctggggacc

SEQ ID NO: 19306 - DNA, 20 bp, synthetic construct
  misc_feature 1..20: note = Artificial sequence related to HLA knockouts in cell therapy
  source 1..20: mol_type = other DNA
ccgagtggacctggggaccc

SEQ ID NO: 19307 - DNA, 20 bp, synthetic construct
  misc_feature 1..20: note = Artificial sequence related to HLA knockouts in cell therapy
  source 1..20: mol_type = other DNA
cgagtggacctggggaccct

SEQ ID NO: 19308 - DNA, 20 bp, synthetic construct
  misc_feature 1..20: note = Artificial sequence related to HLA knockouts in cell therapy
  source 1..20: mol_type = other DNA
gagtggacctggggaccctg

SEQ ID NO: 19309 - DNA, 20 bp, synthetic construct
  misc_feature 1..20: note = Artificial sequence related to HLA knockouts in cell therapy
  source 1..20: mol_type = other DNA
agtggacctggggaccctgc

SEQ ID NO: 19310 - DNA, 20 bp, synthetic construct
  misc_feature 1..20: note = Artificial sequence related to HLA knockouts in cell therapy
  source 1..20: mol_type = other DNA
gtggacctggggaccctgcg

SEQ ID NO: 19311 - DNA, 20 bp, synthetic construct
  misc_feature 1..20: note = Artificial sequence related to HLA knockouts in cell therapy
  source 1..20: mol_type = other DNA
tggacctggggaccctgcgc

SEQ ID NO: 19312 - DNA, 20 bp, synthetic construct
  misc_feature 1..20: note = Artificial sequence related to HLA knockouts in cell therapy
  source 1..20: mol_type = other DNA
ggacctggggaccctgcgcg

SEQ ID NO: 19313 - DNA, 20 bp, synthetic construct
  misc_feature 1..20: note = Artificial sequence related to HLA knockouts in cell therapy
  source 1..20: mol_type = other DNA
gacctggggaccctgcgcgg

SEQ ID NO: 19314 - DNA, 20 bp, synthetic construct
  misc_feature 1..20: note = Artificial sequence related to HLA knockouts in cell therapy
  source 1..20: mol_type = other DNA
acctggggaccctgcgcggc

SEQ ID NO: 19315 - DNA, 20 bp, synthetic construct
  misc_feature 1..20: note = Artificial sequence related to HLA knockouts in cell therapy
  source 1..20: mol_type = other DNA
cctggggaccctgcgcggct

SEQ ID NO: 19316 - DNA, 20 bp, synthetic construct
  misc_feature 1..20: note = Artificial sequence related to HLA knockouts in cell therapy
  source 1..20: mol_type = other DNA
ctggggaccctgcgcggcta

SEQ ID NO: 19317 - DNA, 20 bp, synthetic construct
  misc_feature 1..20: note = Artificial sequence related to HLA knockouts in cell therapy
  source 1..20: mol_type = other DNA
tggggaccctgcgcggctac

SEQ ID NO: 19318 - DNA, 20 bp, synthetic construct
  misc_feature 1..20: note = Artificial sequence related to HLA knockouts in cell therapy
  source 1..20: mol_type = other DNA
ggggaccctgcgcggctact

SEQ ID NO: 19319 - DNA, 20 bp, synthetic construct
  misc_feature 1..20: note = Artificial sequence related to HLA knockouts in cell therapy
  source 1..20: mol_type = other DNA
gggaccctgcgcggctacta

SEQ ID NO: 19320 - DNA, 20 bp, synthetic construct
  misc_feature 1..20: note = Artificial sequence related to HLA knockouts in cell therapy
  source 1..20: mol_type = other DNA
ggaccctgcgcggctactac

SEQ ID NO: 19321 - DNA, 20 bp, synthetic construct
  misc_feature 1..20: note = Artificial sequence related to HLA knockouts in cell therapy
  source 1..20: mol_type = other DNA
gaccctgcgcggctactaca

SEQ ID NO: 19322 - DNA, 20 bp, synthetic construct
  misc_feature 1..20: note = Artificial sequence related to HLA knockouts in cell therapy
  source 1..20: mol_type = other DNA
accctgcgcggctactacaa

SEQ ID NO: 19323 - DNA, 20 bp, synthetic construct
  misc_feature 1..20: note = Artificial sequence related to HLA knockouts in cell therapy
  source 1..20: mol_type = other DNA
ccctgcgcggctactacaac

SEQ ID NO: 19324 - DNA, 20 bp, synthetic construct
  misc_feature 1..20: note = Artificial sequence related to HLA knockouts in cell therapy
  source 1..20: mol_type = other DNA
cctgcgcggctactacaacc

SEQ ID NO: 19325 - DNA, 20 bp, synthetic construct
  misc_feature 1..20: note = Artificial sequence related to HLA knockouts in cell therapy
  source 1..20: mol_type = other DNA
ctgcgcggctactacaacca

SEQ ID NO: 19326 - DNA, 20 bp, synthetic construct
  misc_feature 1..20: note = Artificial sequence related to HLA knockouts in cell therapy
  source 1..20: mol_type = other DNA
tgcgcggctactacaaccag

SEQ ID NO: 19327 - DNA, 20 bp, synthetic construct
  misc_feature 1..20: note = Artificial sequence related to HLA knockouts in cell therapy
  source 1..20: mol_type = other DNA
gcgcggctactacaaccaga

SEQ ID NO: 19328 - DNA, 20 bp, synthetic construct
  misc_feature 1..20: note = Artificial sequence related to HLA knockouts in cell therapy
  source 1..20: mol_type = other DNA
cgcggctactacaaccagag

SEQ ID NO: 19329 - DNA, 20 bp, synthetic construct
  misc_feature 1..20: note = Artificial sequence related to HLA knockouts in cell therapy
  source 1..20: mol_type = other DNA
gcggctactacaaccagagc

SEQ ID NO: 19330 - DNA, 20 bp, synthetic construct
  misc_feature 1..20: note = Artificial sequence related to HLA knockouts in cell therapy
  source 1..20: mol_type = other DNA
cggctactacaaccagagcg

SEQ ID NO: 19331 - DNA, 20 bp, synthetic construct
  misc_feature 1..20: note = Artificial sequence related to HLA knockouts in cell therapy
  source 1..20: mol_type = other DNA
actacaaccagagcgaggcc

SEQ ID NO: 19332 - DNA, 20 bp, synthetic construct
  misc_feature 1..20: note = Artificial sequence related to HLA knockouts in cell therapy
  source 1..20: mol_type = other DNA
ctacaaccagagcgaggccg

SEQ ID NO: 19333 - DNA, 20 bp, synthetic construct
  misc_feature 1..20: note = Artificial sequence related to HLA knockouts in cell therapy
  source 1..20: mol_type = other DNA
tacaaccagagcgaggccgg

SEQ ID NO: 19334 - DNA, 20 bp, synthetic construct
  misc_feature 1..20: note = Artificial sequence related to HLA knockouts in cell therapy
  source 1..20: mol_type = other DNA
acaaccagagcgaggccggt

SEQ ID NO: 19335 - DNA, 20 bp, synthetic construct
  misc_feature 1..20: note = Artificial sequence related to HLA knockouts in cell therapy
  source 1..20: mol_type = other DNA
caaccagagcgaggccggtt

SEQ ID NO: 19336 - DNA, 20 bp, synthetic construct
  misc_feature 1..20: note = Artificial sequence related to HLA knockouts in cell therapy
  source 1..20: mol_type = other DNA
aaccagagcgaggccggttc

SEQ ID NO: 19337 - DNA, 20 bp, synthetic construct
  misc_feature 1..20: note = Artificial sequence related to HLA knockouts in cell therapy
  source 1..20: mol_type = other DNA
accagagcgaggccggttct

SEQ ID NO: 19338 - DNA, 20 bp, synthetic construct
  misc_feature 1..20: note = Artificial sequence related to HLA knockouts in cell therapy
  source 1..20: mol_type = other DNA
ccagagcgaggccggttctc

SEQ ID NO: 19339 - DNA, 20 bp, synthetic construct
  misc_feature 1..20: note = Artificial sequence related to HLA knockouts in cell therapy
  source 1..20: mol_type = other DNA
cagagcgaggccggttctca

SEQ ID NO: 19340 - DNA, 20 bp, synthetic construct
  misc_feature 1..20: note = Artificial sequence related to HLA knockouts in cell therapy
  source 1..20: mol_type = other DNA
agagcgaggccggttctcac

SEQ ID NO: 19341 - DNA, 20 bp, synthetic construct
  misc_feature 1..20: note = Artificial sequence related to HLA knockouts in cell therapy
  source 1..20: mol_type = other DNA
gagcgaggccggttctcaca

SEQ ID NO: 19342 - DNA, 20 bp, synthetic construct
  misc_feature 1..20: note = Artificial sequence related to HLA knockouts in cell therapy
  source 1..20: mol_type = other DNA
agcgaggccggttctcacac

SEQ ID NO: 19343 - DNA, 20 bp, synthetic construct
  misc_feature 1..20: note = Artificial sequence related to HLA knockouts in cell therapy
  source 1..20: mol_type = other DNA
gcgaggccggttctcacacc

SEQ ID NO: 19344 - DNA, 20 bp, synthetic construct
  misc_feature 1..20: note = Artificial sequence related to HLA knockouts in cell therapy
  source 1..20: mol_type = other DNA
cgaggccggttctcacaccg

SEQ ID NO: 19345 - DNA, 20 bp, synthetic construct
  misc_feature 1..20: note = Artificial sequence related to HLA knockouts in cell therapy
  source 1..20: mol_type = other DNA
gaggccggttctcacaccgt

SEQ ID NO: 19346 - DNA, 20 bp, synthetic construct
  misc_feature 1..20: note = Artificial sequence related to HLA knockouts in cell therapy
  source 1..20: mol_type = other DNA
aggccggttctcacaccgtc

SEQ ID NO: 19347 - DNA, 20 bp, synthetic construct
  misc_feature 1..20: note = Artificial sequence related to HLA knockouts in cell therapy
  source 1..20: mol_type = other DNA
ggccggttctcacaccgtcc

SEQ ID NO: 19348 - DNA, 20 bp, synthetic construct
  misc_feature 1..20: note = Artificial sequence related to HLA knockouts in cell therapy
  source 1..20: mol_type = other DNA
gccggttctcacaccgtcca

SEQ ID NO: 19349 - DNA, 20 bp, synthetic construct
  misc_feature 1..20: note = Artificial sequence related to HLA knockouts in cell therapy
  source 1..20: mol_type = other DNA
ccggttctcacaccgtccag

SEQ ID NO: 19350 - DNA, 20 bp, synthetic construct
  misc_feature 1..20: note = Artificial sequence related to HLA knockouts in cell therapy
  source 1..20: mol_type = other DNA
cggttctcacaccgtccaga

SEQ ID NO: 19351 - DNA, 20 bp, synthetic construct
  misc_feature 1..20: note = Artificial sequence related to HLA knockouts in cell therapy
  source 1..20: mol_type = other DNA
ggttctcacaccgtccagag

SEQ ID NO: 19352 - DNA, 20 bp, synthetic construct
  misc_feature 1..20: note = Artificial sequence related to HLA knockouts in cell therapy
  source 1..20: mol_type = other DNA
gttctcacaccgtccagagg

SEQ ID NO: 19353 - DNA, 20 bp, synthetic construct
  misc_feature 1..20: note = Artificial sequence related to HLA knockouts in cell therapy
  source 1..20: mol_type = other DNA
ctcacaccgtccagaggatg

SEQ ID NO: 19354 - DNA, 20 bp, synthetic construct
  misc_feature 1..20: note = Artificial sequence related to HLA knockouts in cell therapy
  source 1..20: mol_type = other DNA
ccgtccagaggatgtatggc

SEQ ID NO: 19355 - DNA, 20 bp, synthetic construct
  misc_feature 1..20: note = Artificial sequence related to HLA knockouts in cell therapy
  source 1..20: mol_type = other DNA
ccagaggatgtatggctgcg

SEQ ID NO: 19356 - DNA, 20 bp, synthetic construct
  misc_feature 1..20: note = Artificial sequence related to HLA knockouts in cell therapy
  source 1..20: mol_type = other DNA
gaggatgtatggctgcgacg

SEQ ID NO: 19357 - DNA, 20 bp, synthetic construct
  misc_feature 1..20: note = Artificial sequence related to HLA knockouts in cell therapy
  source 1..20: mol_type = other DNA
ggatgtatggctgcgacgtg

SEQ ID NO: 19358 - DNA, 20 bp, synthetic construct
  misc_feature 1..20: note = Artificial sequence related to HLA knockouts in cell therapy
  source 1..20: mol_type = other DNA
gatgtatggctgcgacgtgg

SEQ ID NO: 19359 - DNA, 20 bp, synthetic construct
  misc_feature 1..20: note = Artificial sequence related to HLA knockouts in cell therapy
  source 1..20: mol_type = other DNA
atgtatggctgcgacgtggg

SEQ ID NO: 19360 - DNA, 20 bp, synthetic construct
  misc_feature 1..20: note = Artificial sequence related to HLA knockouts in cell therapy
  source 1..20: mol_type = other DNA
tgtatggctgcgacgtgggg

SEQ ID NO: 19361 - DNA, 20 bp, synthetic construct
  misc_feature 1..20: note = Artificial sequence related to HLA knockouts in cell therapy
  source 1..20: mol_type = other DNA
gtatggctgcgacgtggggt

SEQ ID NO: 19362 - DNA, 20 bp, synthetic construct
  misc_feature 1..20: note = Artificial sequence related to HLA knockouts in cell therapy
  source 1..20: mol_type = other DNA
tatggctgcgacgtggggtc

SEQ ID NO: 19363 - DNA, 20 bp, synthetic construct
  misc_feature 1..20: note = Artificial sequence related to HLA knockouts in cell therapy
  source 1..20: mol_type = other DNA
atggctgcgacgtggggtcg

SEQ ID NO: 19364 - DNA, 20 bp, synthetic construct
  misc_feature 1..20: note = Artificial sequence related to HLA knockouts in cell therapy
  source 1..20: mol_type = other DNA
tggctgcgacgtggggtcgg

SEQ ID NO: 19365 - DNA, 20 bp, synthetic construct
  misc_feature 1..20: note = Artificial sequence related to HLA knockouts in cell therapy
  source 1..20: mol_type = other DNA
ggctgcgacgtggggtcgga

SEQ ID NO: 19366 - DNA, 20 bp, synthetic construct
  misc_feature 1..20: note = Artificial sequence related to HLA knockouts in cell therapy
  source 1..20: mol_type = other DNA
gctgcgacgtggggtcggac

SEQ ID NO: 19367 - DNA, 20 bp, synthetic construct
  misc_feature 1..20: note = Artificial sequence related to HLA knockouts in cell therapy
  source 1..20: mol_type = other DNA
ctgcgacgtggggtcggact

SEQ ID NO: 19368 - DNA, 20 bp, synthetic construct
  misc_feature 1..20: note = Artificial sequence related to HLA knockouts in cell therapy
  source 1..20: mol_type = other DNA
tgcgacgtggggtcggactg

SEQ ID NO: 19369 - DNA, 20 bp, synthetic construct
  misc_feature 1..20: note = Artificial sequence related to HLA knockouts in cell therapy
  source 1..20: mol_type = other DNA
gcgacgtggggtcggactgg

SEQ ID NO: 19370 - DNA, 20 bp, synthetic construct
  misc_feature 1..20: note = Artificial sequence related to HLA knockouts in cell therapy
  source 1..20: mol_type = other DNA
cgacgtggggtcggactggc

SEQ ID NO: 19371 - DNA, 20 bp, synthetic construct
  misc_feature 1..20: note = Artificial sequence related to HLA knockouts in cell therapy
  source 1..20: mol_type = other DNA
gacgtggggtcggactggcg

SEQ ID NO: 19372 - DNA, 20 bp, synthetic construct
  misc_feature 1..20: note = Artificial sequence related to HLA knockouts in cell therapy
  source 1..20: mol_type = other DNA
acgtggggtcggactggcgc

SEQ ID NO: 19373 - DNA, 20 bp, synthetic construct
  misc_feature 1..20: note = Artificial sequence related to HLA knockouts in cell therapy
  source 1..20: mol_type = other DNA
cgtggggtcggactggcgct

SEQ ID NO: 19374 - DNA, 20 bp, synthetic construct
  misc_feature 1..20: note = Artificial sequence related to HLA knockouts in cell therapy
  source 1..20: mol_type = other DNA
gtggggtcggactggcgctt

SEQ ID NO: 19375 - DNA, 20 bp, synthetic construct
  misc_feature 1..20: note = Artificial sequence related to HLA knockouts in cell therapy
  source 1..20: mol_type = other DNA
tggggtcggactggcgcttc

SEQ ID NO: 19376 - DNA, 20 bp, synthetic construct
  misc_feature 1..20: note = Artificial sequence related to HLA knockouts in cell therapy
  source 1..20: mol_type = other DNA
ggggtcggactggcgcttcc

SEQ ID NO: 19377 - DNA, 20 bp, synthetic construct
  misc_feature 1..20: note = Artificial sequence related to HLA knockouts in cell therapy
  source 1..20: mol_type = other DNA
gggtcggactggcgcttcct

SEQ ID NO: 19378 - DNA, 20 bp, synthetic construct
  misc_feature 1..20: note = Artificial sequence related to HLA knockouts in cell therapy
  source 1..20: mol_type = other DNA
ggtcggactggcgcttcctc

SEQ ID NO: 19379 - DNA, 20 bp, synthetic construct
  misc_feature 1..20: note = Artificial sequence related to HLA knockouts in cell therapy
  source 1..20: mol_type = other DNA
gtcggactggcgcttcctcc

SEQ ID NO: 19380 - DNA, 20 bp, synthetic construct
  misc_feature 1..20: note = Artificial sequence related to HLA knockouts in cell therapy
  source 1..20: mol_type = other DNA
tcggactggcgcttcctccg

SEQ ID NO: 19381 - DNA, 20 bp, synthetic construct
  misc_feature 1..20: note = Artificial sequence related to HLA knockouts in cell therapy
  source 1..20: mol_type = other DNA
cggactggcgcttcctccgc

SEQ ID NO: 19382 - DNA, 20 bp, synthetic construct
  misc_feature 1..20: note = Artificial sequence related to HLA knockouts in cell therapy
  source 1..20: mol_type = other DNA
ggactggcgcttcctccgcg

SEQ ID NO: 19383 - DNA, 20 bp, synthetic construct
  misc_feature 1..20: note = Artificial sequence related to HLA knockouts in cell therapy
  source 1..20: mol_type = other DNA
gactggcgcttcctccgcgg

SEQ ID NO: 19384 - DNA, 20 bp, synthetic construct
  misc_feature 1..20: note = Artificial sequence related to HLA knockouts in cell therapy
  source 1..20: mol_type = other DNA
actggcgcttcctccgcggg

SEQ ID NO: 19385 - DNA, 20 bp, synthetic construct
  misc_feature 1..20: note = Artificial sequence related to HLA knockouts in cell therapy
  source 1..20: mol_type = other DNA
ctggcgcttcctccgcgggt

SEQ ID NO: 19386 - DNA, 20 bp, synthetic construct
  misc_feature 1..20: note = Artificial sequence related to HLA knockouts in cell therapy
  source 1..20: mol_type = other DNA
tggcgcttcctccgcgggta

SEQ ID NO: 19387 - DNA, 20 bp, synthetic construct
  misc_feature 1..20: note = Artificial sequence related to HLA knockouts in cell therapy
  source 1..20: mol_type = other DNA
ggcgcttcctccgcgggtac

SEQ ID NO: 19388 - DNA, 20 bp, synthetic construct
  misc_feature 1..20: note = Artificial sequence related to HLA knockouts in cell therapy
  source 1..20: mol_type = other DNA
gcgcttcctccgcgggtacc

SEQ ID NO: 19389 - DNA, 20 bp, synthetic construct
  misc_feature 1..20: note = Artificial sequence related to HLA knockouts in cell therapy
  source 1..20: mol_type = other DNA
cgcttcctccgcgggtacca

SEQ ID NO: 19390 - DNA, 20 bp, synthetic construct
  misc_feature 1..20: note = Artificial sequence related to HLA knockouts in cell therapy
  source 1..20: mol_type = other DNA
gcttcctccgcgggtaccac

SEQ ID NO: 19391 - DNA, 20 bp, synthetic construct
  misc_feature 1..20: note = Artificial sequence related to HLA knockouts in cell therapy
  source 1..20: mol_type = other DNA
cttcctccgcgggtaccacc

SEQ ID NO: 19392 - DNA, 20 bp, synthetic construct
  misc_feature 1..20: note = Artificial sequence related to HLA knockouts in cell therapy
  source 1..20: mol_type = other DNA
ttcctccgcgggtaccacca

SEQ ID NO: 19393 - DNA, 20 bp, synthetic construct
  misc_feature 1..20: note = Artificial sequence related to HLA knockouts in cell therapy
  source 1..20: mol_type = other DNA
tcctccgcgggtaccaccag

SEQ ID NO: 19394 - DNA, 20 bp, synthetic construct
  misc_feature 1..20: note = Artificial sequence related to HLA knockouts in cell therapy
  source 1..20: mol_type = other DNA
cctccgcgggtaccaccagt

SEQ ID NO: 19395 - DNA, 20 bp, synthetic construct
  misc_feature 1..20: note = Artificial sequence related to HLA knockouts in cell therapy
  source 1..20: mol_type = other DNA
ctccgcgggtaccaccagta

SEQ ID NO: 19396 - DNA, 20 bp, synthetic construct
  misc_feature 1..20: note = Artificial sequence related to HLA knockouts in cell therapy
  source 1..20: mol_type = other DNA
tccgcgggtaccaccagtac

SEQ ID NO: 19397 - DNA, 20 bp, synthetic construct
  misc_feature 1..20: note = Artificial sequence related to HLA knockouts in cell therapy
  source 1..20: mol_type = other DNA
ccgcgggtaccaccagtacg

SEQ ID NO: 19398 - DNA, 20 bp, synthetic construct
  misc_feature 1..20: note = Artificial sequence related to HLA knockouts in cell therapy
  source 1..20: mol_type = other DNA
cgcgggtaccaccagtacgc

SEQ ID NO: 19399 - DNA, 20 bp, synthetic construct
  misc_feature 1..20: note = Artificial sequence related to HLA knockouts in cell therapy
  source 1..20: mol_type = other DNA
gcgggtaccaccagtacgcc

SEQ ID NO: 19400 - DNA, 20 bp, synthetic construct
  misc_feature 1..20: note = Artificial sequence related to HLA knockouts in cell therapy
  source 1..20: mol_type = other DNA
cgggtaccaccagtacgcct

SEQ ID NO: 19401 - DNA, 20 bp, synthetic construct
  misc_feature 1..20: note = Artificial sequence related to HLA knockouts in cell therapy
  source 1..20: mol_type = other DNA
gggtaccaccagtacgccta

SEQ ID NO: 19402 - DNA, 20 bp, synthetic construct
  misc_feature 1..20: note = Artificial sequence related to HLA knockouts in cell therapy
  source 1..20: mol_type = other DNA
ggtaccaccagtacgcctac

SEQ ID NO: 19403 - DNA, 20 bp, synthetic construct
  misc_feature 1..20: note = Artificial sequence related to HLA knockouts in cell therapy
  source 1..20: mol_type = other DNA
gtaccaccagtacgcctacg

SEQ ID NO: 19404 - DNA, 20 bp, synthetic construct
  misc_feature 1..20: note = Artificial sequence related to HLA knockouts in cell therapy
  source 1..20: mol_type = other DNA
accaccagtacgcctacgac

SEQ ID NO: 19405 - DNA, 20 bp, synthetic construct
  misc_feature 1..20: note = Artificial sequence related to HLA knockouts in cell therapy
  source 1..20: mol_type = other DNA
ccaccagtacgcctacgacg

SEQ ID NO: 19406 - DNA, 20 bp, synthetic construct
  misc_feature 1..20: note = Artificial sequence related to HLA knockouts in cell therapy
  source 1..20: mol_type = other DNA
caccagtacgcctacgacgg

SEQ ID NO: 19407 - DNA, 20 bp, synthetic construct
  misc_feature 1..20: note = Artificial sequence related to HLA knockouts in cell therapy
  source 1..20: mol_type = other DNA
accagtacgcctacgacggc

SEQ ID NO: 19408 - DNA, 20 bp, synthetic construct
  misc_feature 1..20: note = Artificial sequence related to HLA knockouts in cell therapy
  source 1..20: mol_type = other DNA
ccagtacgcctacgacggca

SEQ ID NO: 19409 - DNA, 20 bp, synthetic construct
  misc_feature 1..20: note = Artificial sequence related to HLA knockouts in cell therapy
  source 1..20: mol_type = other DNA
cagtacgcctacgacggcaa

SEQ ID NO: 19410 - DNA, 20 bp, synthetic construct
  misc_feature 1..20: note = Artificial sequence related to HLA knockouts in cell therapy
  source 1..20: mol_type = other DNA
agtacgcctacgacggcaag

SEQ ID NO: 19411 - DNA, 20 bp, synthetic construct
  misc_feature 1..20: note = Artificial sequence related to HLA knockouts in cell therapy
  source 1..20: mol_type = other DNA
gtacgcctacgacggcaagg

SEQ ID NO: 19412 - DNA, 20 bp, synthetic construct
  misc_feature 1..20: note = Artificial sequence related to HLA knockouts in cell therapy
  source 1..20: mol_type = other DNA
tacgcctacgacggcaagga

SEQ ID NO: 19413 - DNA, 20 bp, synthetic construct
  misc_feature 1..20: note = Artificial sequence related to HLA knockouts in cell therapy
  source 1..20: mol_type = other DNA
acgcctacgacggcaaggat

SEQ ID NO: 19414 - DNA, 20 bp, synthetic construct
  misc_feature 1..20: note = Artificial sequence related to HLA knockouts in cell therapy
  source 1..20: mol_type = other DNA
cgcctacgacggcaaggatt

SEQ ID NO: 19415 - DNA, 20 bp, synthetic construct
  misc_feature 1..20: note = Artificial sequence related to HLA knockouts in cell therapy
  source 1..20: mol_type = other DNA
cggcaaggattacatcgccc

SEQ ID NO: 19416 - DNA, 20 bp, synthetic construct
  misc_feature 1..20: note = Artificial sequence related to HLA knockouts in cell therapy
  source 1..20: mol_type = other DNA
catcgccctgaaagaggacc

SEQ ID NO: 19417 - DNA, 20 bp, synthetic construct
  misc_feature 1..20: note = Artificial sequence related to HLA knockouts in cell therapy
  source 1..20: mol_type = other DNA
tcgccctgaaagaggacctg

SEQ ID NO: 19418 - DNA, 20 bp, synthetic construct
  misc_feature 1..20: note = Artificial sequence related to HLA knockouts in cell therapy
  source 1..20: mol_type = other DNA
cgccctgaaagaggacctgc

SEQ ID NO: 19419 - DNA, 20 bp, synthetic construct
  misc_feature 1..20: note = Artificial sequence related to HLA knockouts in cell therapy
  source 1..20: mol_type = other DNA
gccctgaaagaggacctgcg

SEQ ID NO: 19420 - DNA, 20 bp, synthetic construct
  misc_feature 1..20: note = Artificial sequence related to HLA knockouts in cell therapy
  source 1..20: mol_type = other DNA
ccctgaaagaggacctgcgc

SEQ ID NO: 19421 - DNA, 20 bp, synthetic construct
  misc_feature 1..20: note = Artificial sequence related to HLA knockouts in cell therapy
  source 1..20: mol_type = other DNA
cctgaaagaggacctgcgct

SEQ ID NO: 19422 - DNA, 20 bp, synthetic construct
  misc_feature 1..20: note = Artificial sequence related to HLA knockouts in cell therapy
  source 1..20: mol_type = other DNA
ctgaaagaggacctgcgctc

SEQ ID NO: 19423 - DNA, 20 bp, synthetic construct
  misc_feature 1..20: note = Artificial sequence related to HLA knockouts in cell therapy
  source 1..20: mol_type = other DNA
aagaggacctgcgctcttgg

SEQ ID NO: 19424 - DNA, 20 bp, synthetic construct
  misc_feature 1..20: note = Artificial sequence related to HLA knockouts in cell therapy
  source 1..20: mol_type = other DNA
agaggacctgcgctcttgga

SEQ ID NO: 19425 - DNA, 20 bp, synthetic construct
  misc_feature 1..20: note = Artificial sequence related to HLA knockouts in cell therapy
  source 1..20: mol_type = other DNA
gaggacctgcgctcttggac

SEQ ID NO: 19426 - DNA, 20 bp, synthetic construct
  misc_feature 1..20: note = Artificial sequence related to HLA knockouts in cell therapy
  source 1..20: mol_type = other DNA
aggacctgcgctcttggacc

SEQ ID NO: 19427 - DNA, 20 bp, synthetic construct
  misc_feature 1..20: note = Artificial sequence related to HLA knockouts in cell therapy
  source 1..20: mol_type = other DNA
ggacctgcgctcttggaccg

SEQ ID NO: 19428 - DNA, 20 bp, synthetic construct
  misc_feature 1..20: note = Artificial sequence related to HLA knockouts in cell therapy
  source 1..20: mol_type = other DNA
gacctgcgctcttggaccgc

SEQ ID NO: 19429 - DNA, 20 bp, synthetic construct
  misc_feature 1..20: note = Artificial sequence related to HLA knockouts in cell therapy
  source 1..20: mol_type = other DNA
acctgcgctcttggaccgcg

SEQ ID NO: 19430 - DNA, 20 bp, synthetic construct
  misc_feature 1..20: note = Artificial sequence related to HLA knockouts in cell therapy
  source 1..20: mol_type = other DNA
cctgcgctcttggaccgcgg

SEQ ID NO: 19431 - DNA, 20 bp, synthetic construct
  misc_feature 1..20: note = Artificial sequence related to HLA knockouts in cell therapy
  source 1..20: mol_type = other DNA
ctgcgctcttggaccgcggc

SEQ ID NO: 19432 - DNA, 20 bp, synthetic construct
  misc_feature 1..20: note = Artificial sequence related to HLA knockouts in cell therapy
  source 1..20: mol_type = other DNA
tgcgctcttggaccgcggcg

SEQ ID NO: 19433 - DNA, 20 bp, synthetic construct
  misc_feature 1..20: note = Artificial sequence related to HLA knockouts in cell therapy
  source 1..20: mol_type = other DNA
gcgctcttggaccgcggcgg

SEQ ID NO: 19434 - DNA, 20 bp, synthetic construct
  misc_feature 1..20: note = Artificial sequence related to HLA knockouts in cell therapy
  source 1..20: mol_type = other DNA
cgctcttggaccgcggcgga

SEQ ID NO: 19435 - DNA, 20 bp, synthetic construct
  misc_feature 1..20: note = Artificial sequence related to HLA knockouts in cell therapy
  source 1..20: mol_type = other DNA
gctcttggaccgcggcggac

SEQ ID NO: 19436 - DNA, 20 bp, synthetic construct
  misc_feature 1..20: note = Artificial sequence related to HLA knockouts in cell therapy
  source 1..20: mol_type = other DNA
ctcttggaccgcggcggaca

SEQ ID NO: 19437 - DNA, 20 bp, synthetic construct
  misc_feature 1..20: note = Artificial sequence related to HLA knockouts in cell therapy
  source 1..20: mol_type = other DNA
tcttggaccgcggcggacat

SEQ ID NO: 19438 - DNA, 20 bp, synthetic construct
  misc_feature 1..20: note = Artificial sequence related to HLA knockouts in cell therapy
  source 1..20: mol_type = other DNA
cttggaccgcggcggacatg

SEQ ID NO: 19439 - DNA, 20 bp, synthetic construct
  misc_feature 1..20: note = Artificial sequence related to HLA knockouts in cell therapy
  source 1..20: mol_type = other DNA
ttggaccgcggcggacatgg

SEQ ID NO: 19440 - DNA, 20 bp, synthetic construct
  misc_feature 1..20: note = Artificial sequence related to HLA knockouts in cell therapy
  source 1..20: mol_type = other DNA
tggaccgcggcggacatggc

SEQ ID NO: 19441 - DNA, 20 bp, synthetic construct
  misc_feature 1..20: note = Artificial sequence related to HLA knockouts in cell therapy
  source 1..20: mol_type = other DNA
ggaccgcggcggacatggca

SEQ ID NO: 19442 - DNA, 20 bp, synthetic construct
  misc_feature 1..20: note = Artificial sequence related to HLA knockouts in cell therapy
  source 1..20: mol_type = other DNA
gaccgcggcggacatggcag

SEQ ID NO: 19443 - DNA, 20 bp, synthetic construct
  misc_feature 1..20: note = Artificial sequence related to HLA knockouts in cell therapy
  source 1..20: mol_type = other DNA
accgcggcggacatggcagc

SEQ ID NO: 19444 - DNA, 20 bp, synthetic construct
  misc_feature 1..20: note = Artificial sequence related to HLA knockouts in cell therapy
  source 1..20: mol_type = other DNA
ccgcggcggacatggcagct

SEQ ID NO: 19445 - DNA, 20 bp, synthetic construct
  misc_feature 1..20: note = Artificial sequence related to HLA knockouts in cell therapy
  source 1..20: mol_type = other DNA
cgcggcggacatggcagctc

SEQ ID NO: 19446 - DNA, 20 bp, synthetic construct
  misc_feature 1..20: note = Artificial sequence related to HLA knockouts in cell therapy
  source 1..20: mol_type = other DNA
gcggcggacatggcagctca

SEQ ID NO: 19447 - DNA, 20 bp, synthetic construct
  misc_feature 1..20: note = Artificial sequence related to HLA knockouts in cell therapy
  source 1..20: mol_type = other DNA
cggcggacatggcagctcag

SEQ ID NO: 19448 - DNA, 20 bp, synthetic construct
  misc_feature 1..20: note = Artificial sequence related to HLA knockouts in cell therapy
  source 1..20: mol_type = other DNA
ggcggacatggcagctcaga

SEQ ID NO: 19449 - DNA, 20 bp, synthetic construct
  misc_feature 1..20: note = Artificial sequence related to HLA knockouts in cell therapy
  source 1..20: mol_type = other DNA
gcggacatggcagctcagac

SEQ ID NO: 19450 - DNA, 20 bp, synthetic construct
  misc_feature 1..20: note = Artificial sequence related to HLA knockouts in cell therapy
  source 1..20: mol_type = other DNA
cggacatggcagctcagacc

SEQ ID NO: 19451 - DNA, 20 bp, synthetic construct
  misc_feature 1..20: note = Artificial sequence related to HLA knockouts in cell therapy
  source 1..20: mol_type = other DNA
ggacatggcagctcagacca

SEQ ID NO: 19452 - DNA, 20 bp, synthetic construct
  misc_feature 1..20: note = Artificial sequence related to HLA knockouts in cell therapy
  source 1..20: mol_type = other DNA
gacatggcagctcagaccac

SEQ ID NO: 19453 - DNA, 20 bp, synthetic construct
  misc_feature 1..20: note = Artificial sequence related to HLA knockouts in cell therapy
  source 1..20: mol_type = other DNA
acatggcagctcagaccacc

SEQ ID NO: 19454 - DNA, 20 bp, synthetic construct
  misc_feature 1..20: note = Artificial sequence related to HLA knockouts in cell therapy
  source 1..20: mol_type = other DNA
catggcagctcagaccacca

SEQ ID NO: 19455 - DNA, 20 bp, synthetic construct
  misc_feature 1..20: note = Artificial sequence related to HLA knockouts in cell therapy
  source 1..20: mol_type = other DNA
tggcagctcagaccaccaag

SEQ ID NO: 19456 - DNA, 20 bp, synthetic construct
  misc_feature 1..20: note = Artificial sequence related to HLA knockouts in cell therapy
  source 1..20: mol_type = other DNA
ggcagctcagaccaccaagc

SEQ ID NO: 19457 - DNA, 20 bp, synthetic construct
  misc_feature 1..20: note = Artificial sequence related to HLA knockouts in cell therapy
  source 1..20: mol_type = other DNA
gcagctcagaccaccaagca

SEQ ID NO: 19458 - DNA, 20 bp, synthetic construct
  misc_feature 1..20: note = Artificial sequence related to HLA knockouts in cell therapy
  source 1..20: mol_type = other DNA
cagctcagaccaccaagcac

SEQ ID NO: 19459 - DNA, 20 bp, synthetic construct
  misc_feature 1..20: note = Artificial sequence related to HLA knockouts in cell therapy
  source 1..20: mol_type = other DNA
gaccaccaagcacaagtggg

SEQ ID NO: 19460 - DNA, 20 bp, synthetic construct
  misc_feature 1..20: note = Artificial sequence related to HLA knockouts in cell therapy
  source 1..20: mol_type = other DNA
ccaccaagcacaagtgggag

SEQ ID NO: 19461 - DNA, 20 bp, synthetic construct
  misc_feature 1..20: note = Artificial sequence related to HLA knockouts in cell therapy
  source 1..20: mol_type = other DNA
caccaagcacaagtgggagg

SEQ ID NO: 19462 - DNA, 20 bp, synthetic construct
  misc_feature 1..20: note = Artificial sequence related to HLA knockouts in cell therapy
  source 1..20: mol_type = other DNA
accaagcacaagtgggaggc

SEQ ID NO: 19463 - DNA, 20 bp, synthetic construct
  misc_feature 1..20: note = Artificial sequence related to HLA knockouts in cell therapy
  source 1..20: mol_type = other DNA
ccaagcacaagtgggaggcg

SEQ ID NO: 19464 - DNA, 20 bp, synthetic construct
  misc_feature 1..20: note = Artificial sequence related to HLA knockouts in cell therapy
  source 1..20: mol_type = other DNA
caagcacaagtgggaggcgg

SEQ ID NO: 19465 - DNA, 20 bp, synthetic construct
  misc_feature 1..20: note = Artificial sequence related to HLA knockouts in cell therapy
  source 1..20: mol_type = other DNA
aagcacaagtgggaggcggc

SEQ ID NO: 19466 - DNA, 20 bp, synthetic construct
  misc_feature 1..20: note = Artificial sequence related to HLA knockouts in cell therapy
  source 1..20: mol_type = other DNA
agcacaagtgggaggcggcc

SEQ ID NO: 19467 - DNA, 20 bp, synthetic construct
  misc_feature 1..20: note = Artificial sequence related to HLA knockouts in cell therapy
  source 1..20: mol_type = other DNA
gcacaagtgggaggcggccc

SEQ ID NO: 19468 - DNA, 20 bp, synthetic construct
  misc_feature 1..20: note = Artificial sequence related to HLA knockouts in cell therapy
  source 1..20: mol_type = other DNA
cacaagtgggaggcggccca

SEQ ID NO: 19469 - DNA, 20 bp, synthetic construct
  misc_feature 1..20: note = Artificial sequence related to HLA knockouts in cell therapy
  source 1..20: mol_type = other DNA
acaagtgggaggcggcccat

SEQ ID NO: 19470 - DNA, 20 bp, synthetic construct
  misc_feature 1..20: note = Artificial sequence related to HLA knockouts in cell therapy
  source 1..20: mol_type = other DNA
caagtgggaggcggcccatg

SEQ ID NO: 19471 - DNA, 20 bp, synthetic construct
  misc_feature 1..20: note = Artificial sequence related to HLA knockouts in cell therapy
  source 1..20: mol_type = other DNA
aagtgggaggcggcccatgt

SEQ ID NO: 19472 - DNA, 20 bp, synthetic construct
  misc_feature 1..20: note = Artificial sequence related to HLA knockouts in cell therapy
  source 1..20: mol_type = other DNA
agtgggaggcggcccatgtg

SEQ ID NO: 19473 - DNA, 20 bp, synthetic construct
  misc_feature 1..20: note = Artificial sequence related to HLA knockouts in cell therapy
  source 1..20: mol_type = other DNA
gtgggaggcggcccatgtgg

SEQ ID NO: 19474 - DNA, 20 bp, synthetic construct
  misc_feature 1..20: note = Artificial sequence related to HLA knockouts in cell therapy
  source 1..20: mol_type = other DNA
tgggaggcggcccatgtggc

SEQ ID NO: 19475 - DNA, 20 bp, synthetic construct
  misc_feature 1..20: note = Artificial sequence related to HLA knockouts in cell therapy
  source 1..20: mol_type = other DNA
gggaggcggcccatgtggcg

SEQ ID NO: 19476 - DNA, 20 bp, synthetic construct
  misc_feature 1..20: note = Artificial sequence related to HLA knockouts in cell therapy
  source 1..20: mol_type = other DNA
ggaggcggcccatgtggcgg

SEQ ID NO: 19477 - DNA, 20 bp, synthetic construct
  misc_feature 1..20: note = Artificial sequence related to HLA knockouts in cell therapy
  source 1..20: mol_type = other DNA
gaggcggcccatgtggcgga

SEQ ID NO: 19478 - DNA, 20 bp, synthetic construct
  misc_feature 1..20: note = Artificial sequence related to HLA knockouts in cell therapy
  source 1..20: mol_type = other DNA
aggcggcccatgtggcggag

SEQ ID NO: 19479 - DNA, 20 bp, synthetic construct
  misc_feature 1..20: note = Artificial sequence related to HLA knockouts in cell therapy
  source 1..20: mol_type = other DNA
ggcggcccatgtggcggagc

SEQ ID NO: 19480 - DNA, 20 bp, synthetic construct
  misc_feature 1..20: note = Artificial sequence related to HLA knockouts in cell therapy
  source 1..20: mol_type = other DNA
gcggcccatgtggcggagca

SEQ ID NO: 19481 - DNA, 20 bp, synthetic construct
  misc_feature 1..20: note = Artificial sequence related to HLA knockouts in cell therapy
  source 1..20: mol_type = other DNA
cggcccatgtggcggagcag

SEQ ID NO: 19482 - DNA, 20 bp, synthetic construct
  misc_feature 1..20: note = Artificial sequence related to HLA knockouts in cell therapy
  source 1..20: mol_type = other DNA
ggcccatgtggcggagcagt

SEQ ID NO: 19483 - DNA, 20 bp, synthetic construct
  misc_feature 1..20: note = Artificial sequence related to HLA knockouts in cell therapy
  source 1..20: mol_type = other DNA
gcccatgtggcggagcagtt

SEQ ID NO: 19484 - DNA, 20 bp, synthetic construct
  misc_feature 1..20: note = Artificial sequence related to HLA knockouts in cell therapy
  source 1..20: mol_type = other DNA
cccatgtggcggagcagttg

SEQ ID NO: 19485 - DNA, 20 bp, synthetic construct
  misc_feature 1..20: note = Artificial sequence related to HLA knockouts in cell therapy
  source 1..20: mol_type = other DNA
ccatgtggcggagcagttga

SEQ ID NO: 19486 - DNA, 20 bp, synthetic construct
  misc_feature 1..20: note = Artificial sequence related to HLA knockouts in cell therapy
  source 1..20: mol_type = other DNA
catgtggcggagcagttgag

SEQ ID NO: 19487 - DNA, 20 bp, synthetic construct
  misc_feature 1..20: note = Artificial sequence related to HLA knockouts in cell therapy
  source 1..20: mol_type = other DNA
tgtggcggagcagttgagag

SEQ ID NO: 19488 - DNA, 20 bp, synthetic construct
  misc_feature 1..20: note = Artificial sequence related to HLA knockouts in cell therapy
  source 1..20: mol_type = other DNA
gtggcggagcagttgagagc

SEQ ID NO: 19489 - DNA, 20 bp, synthetic construct
  misc_feature 1..20: note = Artificial sequence related to HLA knockouts in cell therapy
  source 1..20: mol_type = other DNA
tggcggagcagttgagagcc

SEQ ID NO: 19490 - DNA, 20 bp, synthetic construct
  misc_feature 1..20: note = Artificial sequence related to HLA knockouts in cell therapy
  source 1..20: mol_type = other DNA
ggcggagcagttgagagcct

SEQ ID NO: 19491 - DNA, 20 bp, synthetic construct
  misc_feature 1..20: note = Artificial sequence related to HLA knockouts in cell therapy
  source 1..20: mol_type = other DNA
gcggagcagttgagagccta

SEQ ID NO: 19492 - DNA, 20 bp, synthetic construct
  misc_feature 1..20: note = Artificial sequence related to HLA knockouts in cell therapy
  source 1..20: mol_type = other DNA
cggagcagttgagagcctac

SEQ ID NO: 19493 - DNA, 20 bp, synthetic construct
  misc_feature 1..20: note = Artificial sequence related to HLA knockouts in cell therapy
  source 1..20: mol_type = other DNA
ggagcagttgagagcctacc

SEQ ID NO: 19494 - DNA, 20 bp, synthetic construct
  misc_feature 1..20: note = Artificial sequence related to HLA knockouts in cell therapy
  source 1..20: mol_type = other DNA
gcagttgagagcctacctgg

SEQ ID NO: 19495 - DNA, 20 bp, synthetic construct
  misc_feature 1..20: note = Artificial sequence related to HLA knockouts in cell therapy
  source 1..20: mol_type = other DNA
gttgagagcctacctggagg

SEQ ID NO: 19496 - DNA, 20 bp, synthetic construct
  misc_feature 1..20: note = Artificial sequence related to HLA knockouts in cell therapy
  source 1..20: mol_type = other DNA
ttgagagcctacctggaggg

SEQ ID NO: 19497 - DNA, 20 bp, synthetic construct
  misc_feature 1..20: note = Artificial sequence related to HLA knockouts in cell therapy
  source 1..20: mol_type = other DNA
tgagagcctacctggagggc

SEQ ID NO: 19498 - DNA, 20 bp, synthetic construct
  misc_feature 1..20: note = Artificial sequence related to HLA knockouts in cell therapy
  source 1..20: mol_type = other DNA
gagagcctacctggagggca

SEQ ID NO: 19499 - DNA, 20 bp, synthetic construct
  misc_feature 1..20: note = Artificial sequence related to HLA knockouts in cell therapy
  source 1..20: mol_type = other DNA
agagcctacctggagggcac

SEQ ID NO: 19500 - DNA, 20 bp, synthetic construct
  misc_feature 1..20: note = Artificial sequence related to HLA knockouts in cell therapy
  source 1..20: mol_type = other DNA
gagcctacctggagggcacg

SEQ ID NO: 19501 - DNA, 20 bp, synthetic construct
  misc_feature 1..20: note = Artificial sequence related to HLA knockouts in cell therapy
  source 1..20: mol_type = other DNA
agcctacctggagggcacgt

SEQ ID NO: 19502 - DNA, 20 bp, synthetic construct
  misc_feature 1..20: note = Artificial sequence related to HLA knockouts in cell therapy
  source 1..20: mol_type = other DNA
gcctacctggagggcacgtg

SEQ ID NO: 19503 - DNA, 20 bp, synthetic construct
  misc_feature 1..20: note = Artificial sequence related to HLA knockouts in cell therapy
  source 1..20: mol_type = other DNA
cctacctggagggcacgtgc

SEQ ID NO: 19504 - DNA, 20 bp, synthetic construct
  misc_feature 1..20: note = Artificial sequence related to HLA knockouts in cell therapy
  source 1..20: mol_type = other DNA
ctacctggagggcacgtgcg

SEQ ID NO: 19505 - DNA, 20 bp, synthetic construct
  misc_feature 1..20: note = Artificial sequence related to HLA knockouts in cell therapy
  source 1..20: mol_type = other DNA
tacctggagggcacgtgcgt

SEQ ID NO: 19506 - DNA, 20 bp, synthetic construct
  misc_feature 1..20: note = Artificial sequence related to HLA knockouts in cell therapy
  source 1..20: mol_type = other DNA
acctggagggcacgtgcgtg

SEQ ID NO: 19507 - DNA, 20 bp, synthetic construct
  misc_feature 1..20: note = Artificial sequence related to HLA knockouts in cell therapy
  source 1..20: mol_type = other DNA
cctggagggcacgtgcgtgg

SEQ ID NO: 19508 - DNA, 20 bp, synthetic construct
  misc_feature 1..20: note = Artificial sequence related to HLA knockouts in cell therapy
  source 1..20: mol_type = other DNA
ctggagggcacgtgcgtgga

SEQ ID NO: 19509 - DNA, 20 bp, synthetic construct
  misc_feature 1..20: note = Artificial sequence related to HLA knockouts in cell therapy
  source 1..20: mol_type = other DNA
tggagggcacgtgcgtggag

SEQ ID NO: 19510 - DNA, 20 bp, synthetic construct
  misc_feature 1..20: note = Artificial sequence related to HLA knockouts in cell therapy
  source 1..20: mol_type = other DNA
ggagggcacgtgcgtggagt

SEQ ID NO: 19511 - DNA, 20 bp, synthetic construct
  misc_feature 1..20: note = Artificial sequence related to HLA knockouts in cell therapy
  source 1..20: mol_type = other DNA
gagggcacgtgcgtggagtg

SEQ ID NO: 19512 - DNA, 20 bp, synthetic construct
  misc_feature 1..20: note = Artificial sequence related to HLA knockouts in cell therapy
  source 1..20: mol_type = other DNA
agggcacgtgcgtggagtgg

SEQ ID NO: 19513 - DNA, 20 bp, synthetic construct
  misc_feature 1..20: note = Artificial sequence related to HLA knockouts in cell therapy
  source 1..20: mol_type = other DNA
gggcacgtgcgtggagtggc

SEQ ID NO: 19514 - DNA, 20 bp, synthetic construct
  misc_feature 1..20: note = Artificial sequence related to HLA knockouts in cell therapy
  source 1..20: mol_type = other DNA
ggcacgtgcgtggagtggct

SEQ ID NO: 19515 - DNA, 20 bp, synthetic construct
  misc_feature 1..20: note = Artificial sequence related to HLA knockouts in cell therapy
  source 1..20: mol_type = other DNA
gcacgtgcgtggagtggctc

SEQ ID NO: 19516 - DNA, 20 bp, synthetic construct
  misc_feature 1..20: note = Artificial sequence related to HLA knockouts in cell therapy
  source 1..20: mol_type = other DNA
cacgtgcgtggagtggctcc

SEQ ID NO: 19517 - DNA, 20 bp, synthetic construct
  misc_feature 1..20: note = Artificial sequence related to HLA knockouts in cell therapy
  source 1..20: mol_type = other DNA
acgtgcgtggagtggctccg

SEQ ID NO: 19518 - DNA, 20 bp, synthetic construct
  misc_feature 1..20: note = Artificial sequence related to HLA knockouts in cell therapy
  source 1..20: mol_type = other DNA
cgtgcgtggagtggctccgc

SEQ ID NO: 19519 - DNA, 20 bp, synthetic construct
  misc_feature 1..20: note = Artificial sequence related to HLA knockouts in cell therapy
  source 1..20: mol_type = other DNA
gtgcgtggagtggctccgca

SEQ ID NO: 19520 - DNA, 20 bp, synthetic construct
  misc_feature 1..20: note = Artificial sequence related to HLA knockouts in cell therapy
  source 1..20: mol_type = other DNA
tgcgtggagtggctccgcag

SEQ ID NO: 19521 - DNA, 20 bp, synthetic construct
  misc_feature 1..20: note = Artificial sequence related to HLA knockouts in cell therapy
  source 1..20: mol_type = other DNA
gcgtggagtggctccgcaga

SEQ ID NO: 19522 - DNA, 20 bp, synthetic construct
  misc_feature 1..20: note = Artificial sequence related to HLA knockouts in cell therapy
  source 1..20: mol_type = other DNA
cgtggagtggctccgcagat

SEQ ID NO: 19523 - DNA, 20 bp, synthetic construct
  misc_feature 1..20: note = Artificial sequence related to HLA knockouts in cell therapy
  source 1..20: mol_type = other DNA
gtggagtggctccgcagata

SEQ ID NO: 19524 - DNA, 20 bp, synthetic construct
  misc_feature 1..20: note = Artificial sequence related to HLA knockouts in cell therapy
  source 1..20: mol_type = other DNA
tggagtggctccgcagatac

SEQ ID NO: 19525 - DNA, 20 bp, synthetic construct
  misc_feature 1..20: note = Artificial sequence related to HLA knockouts in cell therapy
  source 1..20: mol_type = other DNA
ggagtggctccgcagatacc

SEQ ID NO: 19526 - DNA, 20 bp, synthetic construct
  misc_feature 1..20: note = Artificial sequence related to HLA knockouts in cell therapy
  source 1..20: mol_type = other DNA
gagtggctccgcagatacct

SEQ ID NO: 19527 - DNA, 20 bp, synthetic construct
  misc_feature 1..20: note = Artificial sequence related to HLA knockouts in cell therapy
  source 1..20: mol_type = other DNA
agtggctccgcagatacctg

SEQ ID NO: 19528 - DNA, 20 bp, synthetic construct
  misc_feature 1..20: note = Artificial sequence related to HLA knockouts in cell therapy
  source 1..20: mol_type = other DNA
gtggctccgcagatacctgg

SEQ ID NO: 19529 - DNA, 20 bp, synthetic construct
  misc_feature 1..20: note = Artificial sequence related to HLA knockouts in cell therapy
  source 1..20: mol_type = other DNA
tggctccgcagatacctgga

SEQ ID NO: 19530 - DNA, 20 bp, synthetic construct
  misc_feature 1..20: note = Artificial sequence related to HLA knockouts in cell therapy
  source 1..20: mol_type = other DNA
ggctccgcagatacctggag

SEQ ID NO: 19531 - DNA, 20 bp, synthetic construct
  misc_feature 1..20: note = Artificial sequence related to HLA knockouts in cell therapy
  source 1..20: mol_type = other DNA
gctccgcagatacctggaga

SEQ ID NO: 19532 - DNA, 20 bp, synthetic construct
  misc_feature 1..20: note = Artificial sequence related to HLA knockouts in cell therapy
  source 1..20: mol_type = other DNA
ccgcagatacctggagaacg

SEQ ID NO: 19533 - DNA, 20 bp, synthetic construct
  misc_feature 1..20: note = Artificial sequence related to HLA knockouts in cell therapy
  source 1..20: mol_type = other DNA
cgcagatacctggagaacgg

SEQ ID NO: 19534 - DNA, 20 bp, synthetic construct
  misc_feature 1..20: note = Artificial sequence related to HLA knockouts in cell therapy
  source 1..20: mol_type = other DNA
gcagatacctggagaacggg

SEQ ID NO: 19535 - DNA, 20 bp, synthetic construct
  misc_feature 1..20: note = Artificial sequence related to HLA knockouts in cell therapy
  source 1..20: mol_type = other DNA
acctggagaacgggaaggag

SEQ ID NO: 19536 - DNA, 20 bp, synthetic construct
  misc_feature 1..20: note = Artificial sequence related to HLA knockouts in cell therapy
  source 1..20: mol_type = other DNA
cctggagaacgggaaggaga

SEQ ID NO: 19537 - DNA, 20 bp, synthetic construct
  misc_feature 1..20: note = Artificial sequence related to HLA knockouts in cell therapy
  source 1..20: mol_type = other DNA
ctggagaacgggaaggagac

SEQ ID NO: 19538 - DNA, 20 bp, synthetic construct
  misc_feature 1..20: note = Artificial sequence related to HLA knockouts in cell therapy
  source 1..20: mol_type = other DNA
tggagaacgggaaggagacg

SEQ ID NO: 19539 - DNA, 20 bp, synthetic construct
  misc_feature 1..20: note = Artificial sequence related to HLA knockouts in cell therapy
  source 1..20: mol_type = other DNA
ggagaacgggaaggagacgc

SEQ ID NO: 19540 - DNA, 20 bp, synthetic construct
  misc_feature 1..20: note = Artificial sequence related to HLA knockouts in cell therapy
  source 1..20: mol_type = other DNA
gagaacgggaaggagacgct

SEQ ID NO: 19541 - DNA, 20 bp, synthetic construct
  misc_feature 1..20: note = Artificial sequence related to HLA knockouts in cell therapy
  source 1..20: mol_type = other DNA
agaacgggaaggagacgctg

SEQ ID NO: 19542 - DNA, 20 bp, synthetic construct
  misc_feature 1..20: note = Artificial sequence related to HLA knockouts in cell therapy
  source 1..20: mol_type = other DNA
gaacgggaaggagacgctgc

SEQ ID NO: 19543 - DNA, 20 bp, synthetic construct
  misc_feature 1..20: note = Artificial sequence related to HLA knockouts in cell therapy
  source 1..20: mol_type = other DNA
aacgggaaggagacgctgca

SEQ ID NO: 19544 - DNA, 20 bp, synthetic construct
  misc_feature 1..20: note = Artificial sequence related to HLA knockouts in cell therapy
  source 1..20: mol_type = other DNA
acgggaaggagacgctgcag

SEQ ID NO: 19545 - DNA, 20 bp, synthetic construct
  misc_feature 1..20: note = Artificial sequence related to HLA knockouts in cell therapy
  source 1..20: mol_type = other DNA
cgggaaggagacgctgcagc

SEQ ID NO: 19546 - DNA, 20 bp, synthetic construct
  misc_feature 1..20: note = Artificial sequence related to HLA knockouts in cell therapy
  source 1..20: mol_type = other DNA
gggaaggagacgctgcagcg

SEQ ID NO: 19547 - DNA, 20 bp, synthetic construct
  misc_feature 1..20: note = Artificial sequence related to HLA knockouts in cell therapy
  source 1..20: mol_type = other DNA
ggaaggagacgctgcagcgc

SEQ ID NO: 19548 - DNA, 20 bp, synthetic construct
  misc_feature 1..20: note = Artificial sequence related to HLA knockouts in cell therapy
  source 1..20: mol_type = other DNA
gaaggagacgctgcagcgca

SEQ ID NO: 19549 - DNA, 20 bp, synthetic construct
  misc_feature 1..20: note = Artificial sequence related to HLA knockouts in cell therapy
  source 1..20: mol_type = other DNA
aaggagacgctgcagcgcac

SEQ ID NO: 19550 - DNA, 20 bp, synthetic construct
  misc_feature 1..20: note = Artificial sequence related to HLA knockouts in cell therapy
  source 1..20: mol_type = other DNA
aggagacgctgcagcgcacg

SEQ ID NO: 19551 - DNA, 20 bp, synthetic construct
  misc_feature 1..20: note = Artificial sequence related to HLA knockouts in cell therapy
  source 1..20: mol_type = other DNA
ggagacgctgcagcgcacgg

SEQ ID NO: 19552 - DNA, 20 bp, synthetic construct
  misc_feature 1..20: note = Artificial sequence related to HLA knockouts in cell therapy
  source 1..20: mol_type = other DNA
gagacgctgcagcgcacgga

SEQ ID NO: 19553 - DNA, 20 bp, synthetic construct
  misc_feature 1..20: note = Artificial sequence related to HLA knockouts in cell therapy
  source 1..20: mol_type = other DNA
agacgctgcagcgcacggac

SEQ ID NO: 19554 - DNA, 20 bp, synthetic construct
  misc_feature 1..20: note = Artificial sequence related to HLA knockouts in cell therapy
  source 1..20: mol_type = other DNA
gacgctgcagcgcacggacg

SEQ ID NO: 19555 - DNA, 20 bp, synthetic construct
  misc_feature 1..20: note = Artificial sequence related to HLA knockouts in cell therapy
  source 1..20: mol_type = other DNA
acgctgcagcgcacggacgc

SEQ ID NO: 19556 - DNA, 20 bp, synthetic construct
  misc_feature 1..20: note = Artificial sequence related to HLA knockouts in cell therapy
  source 1..20: mol_type = other DNA
cgctgcagcgcacggacgcc

SEQ ID NO: 19557 - DNA, 20 bp, synthetic construct
  misc_feature 1..20: note = Artificial sequence related to HLA knockouts in cell therapy
  source 1..20: mol_type = other DNA
gctgcagcgcacggacgccc

SEQ ID NO: 19558 - DNA, 20 bp, synthetic construct
  misc_feature 1..20: note = Artificial sequence related to HLA knockouts in cell therapy
  source 1..20: mol_type = other DNA
ctgcagcgcacggacgcccc

SEQ ID NO: 19559 - DNA, 20 bp, synthetic construct
  misc_feature 1..20: note = Artificial sequence related to HLA knockouts in cell therapy
  source 1..20: mol_type = other DNA
tgcagcgcacggacgccccc

SEQ ID NO: 19560 - DNA, 20 bp, synthetic construct
  misc_feature 1..20: note = Artificial sequence related to HLA knockouts in cell therapy
  source 1..20: mol_type = other DNA
gcagcgcacggacgccccca

SEQ ID NO: 19561 - DNA, 20 bp, synthetic construct
  misc_feature 1..20: note = Artificial sequence related to HLA knockouts in cell therapy
  source 1..20: mol_type = other DNA
cagcgcacggacgcccccaa

SEQ ID NO: 19562 - DNA, 20 bp, synthetic construct
  misc_feature 1..20: note = Artificial sequence related to HLA knockouts in cell therapy
  source 1..20: mol_type = other DNA
agcgcacggacgcccccaaa

SEQ ID NO: 19563 - DNA, 20 bp, synthetic construct
  misc_feature 1..20: note = Artificial sequence related to HLA knockouts in cell therapy
  source 1..20: mol_type = other DNA
gcgcacggacgcccccaaaa

SEQ ID NO: 19564 - DNA, 20 bp, synthetic construct
  misc_feature 1..20: note = Artificial sequence related to HLA knockouts in cell therapy
  source 1..20: mol_type = other DNA
cgcacggacgcccccaaaac

SEQ ID NO: 19565 - DNA, 20 bp, synthetic construct
  misc_feature 1..20: note = Artificial sequence related to HLA knockouts in cell therapy
  source 1..20: mol_type = other DNA
gcacggacgcccccaaaacg

SEQ ID NO: 19566 - DNA, 20 bp, synthetic construct
  misc_feature 1..20: note = Artificial sequence related to HLA knockouts in cell therapy
  source 1..20: mol_type = other DNA
cacggacgcccccaaaacgc

SEQ ID NO: 19567 - DNA, 20 bp, synthetic construct
  misc_feature 1..20: note = Artificial sequence related to HLA knockouts in cell therapy
  source 1..20: mol_type = other DNA
acggacgcccccaaaacgca

SEQ ID NO: 19568 - DNA, 20 bp, synthetic construct
  misc_feature 1..20: note = Artificial sequence related to HLA knockouts in cell therapy
  source 1..20: mol_type = other DNA
cggacgcccccaaaacgcat

SEQ ID NO: 19569 - DNA, 20 bp, synthetic construct
  misc_feature 1..20: note = Artificial sequence related to HLA knockouts in cell therapy
  source 1..20: mol_type = other DNA
ggacgcccccaaaacgcata

SEQ ID NO: 19570 - DNA, 20 bp, synthetic construct
  misc_feature 1..20: note = Artificial sequence related to HLA knockouts in cell therapy
  source 1..20: mol_type = other DNA
gactcaccacgctgtctctg

SEQ ID NO: 19571 - DNA, 20 bp, synthetic construct
  misc_feature 1..20: note = Artificial sequence related to HLA knockouts in cell therapy
  source 1..20: mol_type = other DNA
ctcaccacgctgtctctgac

SEQ ID NO: 19572 - DNA, 20 bp, synthetic construct
  misc_feature 1..20: note = Artificial sequence related to HLA knockouts in cell therapy
  source 1..20: mol_type = other DNA
tcaccacgctgtctctgacc

SEQ ID NO: 19573 - DNA, 20 bp, synthetic construct
  misc_feature 1..20: note = Artificial sequence related to HLA knockouts in cell therapy
  source 1..20: mol_type = other DNA
caccacgctgtctctgacca

SEQ ID NO: 19574 - DNA, 20 bp, synthetic construct
  misc_feature 1..20: note = Artificial sequence related to HLA knockouts in cell therapy
  source 1..20: mol_type = other DNA
ccacgctgtctctgaccatg

SEQ ID NO: 19575 - DNA, 20 bp, synthetic construct
  misc_feature 1..20: note = Artificial sequence related to HLA knockouts in cell therapy
  source 1..20: mol_type = other DNA
ctctgaccatgaagccaccc

SEQ ID NO: 19576 - DNA, 20 bp, synthetic construct
  misc_feature 1..20: note = Artificial sequence related to HLA knockouts in cell therapy
  source 1..20: mol_type = other DNA
ctgaccatgaagccaccctg

SEQ ID NO: 19577 - DNA, 20 bp, synthetic construct
  misc_feature 1..20: note = Artificial sequence related to HLA knockouts in cell therapy
  source 1..20: mol_type = other DNA
gaccatgaagccaccctgag

SEQ ID NO: 19578 - DNA, 20 bp, synthetic construct
  misc_feature 1..20: note = Artificial sequence related to HLA knockouts in cell therapy
  source 1..20: mol_type = other DNA
accatgaagccaccctgagg

SEQ ID NO: 19579 - DNA, 20 bp, synthetic construct
  misc_feature 1..20: note = Artificial sequence related to HLA knockouts in cell therapy
  source 1..20: mol_type = other DNA
ccatgaagccaccctgaggt

SEQ ID NO: 19580 - DNA, 20 bp, synthetic construct
  misc_feature 1..20: note = Artificial sequence related to HLA knockouts in cell therapy
  source 1..20: mol_type = other DNA
catgaagccaccctgaggtg

SEQ ID NO: 19581 - DNA, 20 bp, synthetic construct
  misc_feature 1..20: note = Artificial sequence related to HLA knockouts in cell therapy
  source 1..20: mol_type = other DNA
atgaagccaccctgaggtgc

SEQ ID NO: 19582 - DNA, 20 bp, synthetic construct
  misc_feature 1..20: note = Artificial sequence related to HLA knockouts in cell therapy
  source 1..20: mol_type = other DNA
tgaagccaccctgaggtgct

SEQ ID NO: 19583 - DNA, 20 bp, synthetic construct
  misc_feature 1..20: note = Artificial sequence related to HLA knockouts in cell therapy
  source 1..20: mol_type = other DNA
gaagccaccctgaggtgctg

SEQ ID NO: 19584 - DNA, 20 bp, synthetic construct
  misc_feature 1..20: note = Artificial sequence related to HLA knockouts in cell therapy
  source 1..20: mol_type = other DNA
aagccaccctgaggtgctgg

SEQ ID NO: 19585 - DNA, 20 bp, synthetic construct
  misc_feature 1..20: note = Artificial sequence related to HLA knockouts in cell therapy
  source 1..20: mol_type = other DNA
agccaccctgaggtgctggg

SEQ ID NO: 19586 - DNA, 20 bp, synthetic construct
  misc_feature 1..20: note = Artificial sequence related to HLA knockouts in cell therapy
  source 1..20: mol_type = other DNA
gccaccctgaggtgctgggc

SEQ ID NO: 19587 - DNA, 20 bp, synthetic construct
  misc_feature 1..20: note = Artificial sequence related to HLA knockouts in cell therapy
  source 1..20: mol_type = other DNA
ccaccctgaggtgctgggcc

SEQ ID NO: 19588 - DNA, 20 bp, synthetic construct
  misc_feature 1..20: note = Artificial sequence related to HLA knockouts in cell therapy
  source 1..20: mol_type = other DNA
caccctgaggtgctgggccc

SEQ ID NO: 19589 - DNA, 20 bp, synthetic construct
  misc_feature 1..20: note = Artificial sequence related to HLA knockouts in cell therapy
  source 1..20: mol_type = other DNA
accctgaggtgctgggccct

SEQ ID NO: 19590 - DNA, 20 bp, synthetic construct
  misc_feature 1..20: note = Artificial sequence related to HLA knockouts in cell therapy
  source 1..20: mol_type = other DNA
ccctgaggtgctgggccctg

SEQ ID NO: 19591 - DNA, 20 bp, synthetic construct
  misc_feature 1..20: note = Artificial sequence related to HLA knockouts in cell therapy
  source 1..20: mol_type = other DNA
cctgaggtgctgggccctga

SEQ ID NO: 19592 - DNA, 20 bp, synthetic construct
  misc_feature 1..20: note = Artificial sequence related to HLA knockouts in cell therapy
  source 1..20: mol_type = other DNA
ctgaggtgctgggccctgag

SEQ ID NO: 19593 - DNA, 20 bp, synthetic construct
  misc_feature 1..20: note = Artificial sequence related to HLA knockouts in cell therapy
  source 1..20: mol_type = other DNA
tgaggtgctgggccctgagc

SEQ ID NO: 19594 - DNA, 20 bp, synthetic construct
  misc_feature 1..20: note = Artificial sequence related to HLA knockouts in cell therapy
  source 1..20: mol_type = other DNA
gaggtgctgggccctgagct

SEQ ID NO: 19595 - DNA, 20 bp, synthetic construct
  misc_feature 1..20: note = Artificial sequence related to HLA knockouts in cell therapy
  source 1..20: mol_type = other DNA
aggtgctgggccctgagctt

SEQ ID NO: 19596 - DNA, 20 bp, synthetic construct
  misc_feature 1..20: note = Artificial sequence related to HLA knockouts in cell therapy
  source 1..20: mol_type = other DNA
ggtgctgggccctgagcttc

SEQ ID NO: 19597 - DNA, 20 bp, synthetic construct
  misc_feature 1..20: note = Artificial sequence related to HLA knockouts in cell therapy
  source 1..20: mol_type = other DNA
gtgctgggccctgagcttct

SEQ ID NO: 19598 - DNA, 20 bp, synthetic construct
  misc_feature 1..20: note = Artificial sequence related to HLA knockouts in cell therapy
  source 1..20: mol_type = other DNA
tgctgggccctgagcttcta

SEQ ID NO: 19599 - DNA, 20 bp, synthetic construct
  misc_feature 1..20: note = Artificial sequence related to HLA knockouts in cell therapy
  source 1..20: mol_type = other DNA
gctgggccctgagcttctac

SEQ ID NO: 19600 - DNA, 20 bp, synthetic construct
  misc_feature 1..20: note = Artificial sequence related to HLA knockouts in cell therapy
  source 1..20: mol_type = other DNA
ctgggccctgagcttctacc

SEQ ID NO: 19601 - DNA, 20 bp, synthetic construct
  misc_feature 1..20: note = Artificial sequence related to HLA knockouts in cell therapy
  source 1..20: mol_type = other DNA
tgggccctgagcttctaccc

SEQ ID NO: 19602 - DNA, 20 bp, synthetic construct
  misc_feature 1..20: note = Artificial sequence related to HLA knockouts in cell therapy
  source 1..20: mol_type = other DNA
gggccctgagcttctaccct

SEQ ID NO: 19603 - DNA, 20 bp, synthetic construct
  misc_feature 1..20: note = Artificial sequence related to HLA knockouts in cell therapy
  source 1..20: mol_type = other DNA
ggccctgagcttctaccctg

SEQ ID NO: 19604 - DNA, 20 bp, synthetic construct
  misc_feature 1..20: note = Artificial sequence related to HLA knockouts in cell therapy
  source 1..20: mol_type = other DNA
gccctgagcttctaccctgc

SEQ ID NO: 19605 - DNA, 20 bp, synthetic construct
  misc_feature 1..20: note = Artificial sequence related to HLA knockouts in cell therapy
  source 1..20: mol_type = other DNA
ccctgagcttctaccctgcg

SEQ ID NO: 19606 - DNA, 20 bp, synthetic construct
  misc_feature 1..20: note = Artificial sequence related to HLA knockouts in cell therapy
  source 1..20: mol_type = other DNA
cctgagcttctaccctgcgg

SEQ ID NO: 19607 - DNA, 20 bp, synthetic construct
  misc_feature 1..20: note = Artificial sequence related to HLA knockouts in cell therapy
  source 1..20: mol_type = other DNA
ctgagcttctaccctgcgga

SEQ ID NO: 19608 - DNA, 20 bp, synthetic construct
  misc_feature 1..20: note = Artificial sequence related to HLA knockouts in cell therapy
  source 1..20: mol_type = other DNA
tgagcttctaccctgcggag

SEQ ID NO: 19609 - DNA, 20 bp, synthetic construct
  misc_feature 1..20: note = Artificial sequence related to HLA knockouts in cell therapy
  source 1..20: mol_type = other DNA
gagcttctaccctgcggaga

SEQ ID NO: 19610 - DNA, 20 bp, synthetic construct
  misc_feature 1..20: note = Artificial sequence related to HLA knockouts in cell therapy
  source 1..20: mol_type = other DNA
gcttctaccctgcggagatc

SEQ ID NO: 19611 - DNA, 20 bp, synthetic construct
  misc_feature 1..20: note = Artificial sequence related to HLA knockouts in cell therapy
  source 1..20: mol_type = other DNA
ctaccctgcggagatcacac

SEQ ID NO: 19612 - DNA, 20 bp, synthetic construct
  misc_feature 1..20: note = Artificial sequence related to HLA knockouts in cell therapy
  source 1..20: mol_type = other DNA
accctgcggagatcacactg

SEQ ID NO: 19613 - DNA, 20 bp, synthetic construct
  misc_feature 1..20: note = Artificial sequence related to HLA knockouts in cell therapy
  source 1..20: mol_type = other DNA
ccctgcggagatcacactga

SEQ ID NO: 19614 - DNA, 20 bp, synthetic construct
  misc_feature 1..20: note = Artificial sequence related to HLA knockouts in cell therapy
  source 1..20: mol_type = other DNA
cctgcggagatcacactgac

SEQ ID NO: 19615 - DNA, 20 bp, synthetic construct
  misc_feature 1..20: note = Artificial sequence related to HLA knockouts in cell therapy
  source 1..20: mol_type = other DNA
ctgcggagatcacactgacc

SEQ ID NO: 19616 - DNA, 20 bp, synthetic construct
  misc_feature 1..20: note = Artificial sequence related to HLA knockouts in cell therapy
  source 1..20: mol_type = other DNA
gcggagatcacactgacctg

SEQ ID NO: 19617 - DNA, 20 bp, synthetic construct
  misc_feature 1..20: note = Artificial sequence related to HLA knockouts in cell therapy
  source 1..20: mol_type = other DNA
cggagatcacactgacctgg

SEQ ID NO: 19618 - DNA, 20 bp, synthetic construct
  misc_feature 1..20: note = Artificial sequence related to HLA knockouts in cell therapy
  source 1..20: mol_type = other DNA
ggagatcacactgacctggc

SEQ ID NO: 19619 - DNA, 20 bp, synthetic construct
  misc_feature 1..20: note = Artificial sequence related to HLA knockouts in cell therapy
  source 1..20: mol_type = other DNA
gatcacactgacctggcagc

SEQ ID NO: 19620 - DNA, 20 bp, synthetic construct
  misc_feature 1..20: note = Artificial sequence related to HLA knockouts in cell therapy
  source 1..20: mol_type = other DNA
atcacactgacctggcagcg

SEQ ID NO: 19621 - DNA, 20 bp, synthetic construct
  misc_feature 1..20: note = Artificial sequence related to HLA knockouts in cell therapy
  source 1..20: mol_type = other DNA
tcacactgacctggcagcgg

SEQ ID NO: 19622 - DNA, 20 bp, synthetic construct
  misc_feature 1..20: note = Artificial sequence related to HLA knockouts in cell therapy
  source 1..20: mol_type = other DNA
cacactgacctggcagcggg

SEQ ID NO: 19623 - DNA, 20 bp, synthetic construct
  misc_feature 1..20: note = Artificial sequence related to HLA knockouts in cell therapy
  source 1..20: mol_type = other DNA
acactgacctggcagcggga

SEQ ID NO: 19624 - DNA, 20 bp, synthetic construct
  misc_feature 1..20: note = Artificial sequence related to HLA knockouts in cell therapy
  source 1..20: mol_type = other DNA
cactgacctggcagcgggat

SEQ ID NO: 19625 - DNA, 20 bp, synthetic construct
  misc_feature 1..20: note = Artificial sequence related to HLA knockouts in cell therapy
  source 1..20: mol_type = other DNA
actgacctggcagcgggatg

SEQ ID NO: 19626 - DNA, 20 bp, synthetic construct
  misc_feature 1..20: note = Artificial sequence related to HLA knockouts in cell therapy
  source 1..20: mol_type = other DNA
ctgacctggcagcgggatgg

SEQ ID NO: 19627 - DNA, 20 bp, synthetic construct
  misc_feature 1..20: note = Artificial sequence related to HLA knockouts in cell therapy
  source 1..20: mol_type = other DNA
tgacctggcagcgggatggg

SEQ ID NO: 19628 - DNA, 20 bp, synthetic construct
  misc_feature 1..20: note = Artificial sequence related to HLA knockouts in cell therapy
  source 1..20: mol_type = other DNA
gacctggcagcgggatgggg

SEQ ID NO: 19629 - DNA, 20 bp, synthetic construct
  misc_feature 1..20: note = Artificial sequence related to HLA knockouts in cell therapy
  source 1..20: mol_type = other DNA
acctggcagcgggatgggga

SEQ ID NO: 19630 - DNA, 20 bp, synthetic construct
  misc_feature 1..20: note = Artificial sequence related to HLA knockouts in cell therapy
  source 1..20: mol_type = other DNA
cctggcagcgggatggggag

SEQ ID NO: 19631 - DNA, 20 bp, synthetic construct
  misc_feature 1..20: note = Artificial sequence related to HLA knockouts in cell therapy
  source 1..20: mol_type = other DNA
ctggcagcgggatggggagg

SEQ ID NO: 19632 - DNA, 20 bp, synthetic construct
  misc_feature 1..20: note = Artificial sequence related to HLA knockouts in cell therapy
  source 1..20: mol_type = other DNA
tggcagcgggatggggagga

SEQ ID NO: 19633 - DNA, 20 bp, synthetic construct
  misc_feature 1..20: note = Artificial sequence related to HLA knockouts in cell therapy
  source 1..20: mol_type = other DNA
ggcagcgggatggggaggac

SEQ ID NO: 19634 - DNA, 20 bp, synthetic construct
  misc_feature 1..20: note = Artificial sequence related to HLA knockouts in cell therapy
  source 1..20: mol_type = other DNA
gcagcgggatggggaggacc

SEQ ID NO: 19635 - DNA, 20 bp, synthetic construct
  misc_feature 1..20: note = Artificial sequence related to HLA knockouts in cell therapy
  source 1..20: mol_type = other DNA
cagcgggatggggaggacca

SEQ ID NO: 19636 - DNA, 20 bp, synthetic construct
  misc_feature 1..20: note = Artificial sequence related to HLA knockouts in cell therapy
  source 1..20: mol_type = other DNA
agcgggatggggaggaccag

SEQ ID NO: 19637 - DNA, 20 bp, synthetic construct
  misc_feature 1..20: note = Artificial sequence related to HLA knockouts in cell therapy
  source 1..20: mol_type = other DNA
gcgggatggggaggaccaga

SEQ ID NO: 19638 - DNA, 20 bp, synthetic construct
  misc_feature 1..20: note = Artificial sequence related to HLA knockouts in cell therapy
  source 1..20: mol_type = other DNA
cgggatggggaggaccagac

SEQ ID NO: 19639 - DNA, 20 bp, synthetic construct
  misc_feature 1..20: note = Artificial sequence related to HLA knockouts in cell therapy
  source 1..20: mol_type = other DNA
gggatggggaggaccagacc

SEQ ID NO: 19640 - DNA, 20 bp, synthetic construct
  misc_feature 1..20: note = Artificial sequence related to HLA knockouts in cell therapy
  source 1..20: mol_type = other DNA
ggatggggaggaccagaccc

SEQ ID NO: 19641 - DNA, 20 bp, synthetic construct
  misc_feature 1..20: note = Artificial sequence related to HLA knockouts in cell therapy
  source 1..20: mol_type = other DNA
gatggggaggaccagaccca

SEQ ID NO: 19642 - DNA, 20 bp, synthetic construct
  misc_feature 1..20: note = Artificial sequence related to HLA knockouts in cell therapy
  source 1..20: mol_type = other DNA
atggggaggaccagacccag

SEQ ID NO: 19643 - DNA, 20 bp, synthetic construct
  misc_feature 1..20: note = Artificial sequence related to HLA knockouts in cell therapy
  source 1..20: mol_type = other DNA
tggggaggaccagacccagg

SEQ ID NO: 19644 - DNA, 20 bp, synthetic construct
  misc_feature 1..20: note = Artificial sequence related to HLA knockouts in cell therapy
  source 1..20: mol_type = other DNA
ggggaggaccagacccagga

SEQ ID NO: 19645 - DNA, 20 bp, synthetic construct
  misc_feature 1..20: note = Artificial sequence related to HLA knockouts in cell therapy
  source 1..20: mol_type = other DNA
gggaggaccagacccaggac

SEQ ID NO: 19646 - DNA, 20 bp, synthetic construct
  misc_feature 1..20: note = Artificial sequence related to HLA knockouts in cell therapy
  source 1..20: mol_type = other DNA
ggaggaccagacccaggaca

SEQ ID NO: 19647 - DNA, 20 bp, synthetic construct
  misc_feature 1..20: note = Artificial sequence related to HLA knockouts in cell therapy
  source 1..20: mol_type = other DNA
gaggaccagacccaggacac

SEQ ID NO: 19648 - DNA, 20 bp, synthetic construct
  misc_feature 1..20: note = Artificial sequence related to HLA knockouts in cell therapy
  source 1..20: mol_type = other DNA
aggaccagacccaggacacg

SEQ ID NO: 19649 - DNA, 20 bp, synthetic construct
  misc_feature 1..20: note = Artificial sequence related to HLA knockouts in cell therapy
  source 1..20: mol_type = other DNA
ggaccagacccaggacacgg

SEQ ID NO: 19650 - DNA, 20 bp, synthetic construct
  misc_feature 1..20: note = Artificial sequence related to HLA knockouts in cell therapy
  source 1..20: mol_type = other DNA
gaccagacccaggacacgga

SEQ ID NO: 19651 - DNA, 20 bp, synthetic construct
  misc_feature 1..20: note = Artificial sequence related to HLA knockouts in cell therapy
  source 1..20: mol_type = other DNA
accagacccaggacacggag

SEQ ID NO: 19652 - DNA, 20 bp, synthetic construct
  misc_feature 1..20: note = Artificial sequence related to HLA knockouts in cell therapy
  source 1..20: mol_type = other DNA
ccagacccaggacacggagc

SEQ ID NO: 19653 - DNA, 20 bp, synthetic construct
  misc_feature 1..20: note = Artificial sequence related to HLA knockouts in cell therapy
  source 1..20: mol_type = other DNA
cagacccaggacacggagct

SEQ ID NO: 19654 - DNA, 20 bp, synthetic construct
  misc_feature 1..20: note = Artificial sequence related to HLA knockouts in cell therapy
  source 1..20: mol_type = other DNA
agacccaggacacggagctc

SEQ ID NO: 19655 - DNA, 20 bp, synthetic construct
  misc_feature 1..20: note = Artificial sequence related to HLA knockouts in cell therapy
  source 1..20: mol_type = other DNA
gacccaggacacggagctcg

SEQ ID NO: 19656 - DNA, 20 bp, synthetic construct
  misc_feature 1..20: note = Artificial sequence related to HLA knockouts in cell therapy
  source 1..20: mol_type = other DNA
acccaggacacggagctcgt

SEQ ID NO: 19657 - DNA, 20 bp, synthetic construct
  misc_feature 1..20: note = Artificial sequence related to HLA knockouts in cell therapy
  source 1..20: mol_type = other DNA
cccaggacacggagctcgtg

SEQ ID NO: 19658 - DNA, 20 bp, synthetic construct
  misc_feature 1..20: note = Artificial sequence related to HLA knockouts in cell therapy
  source 1..20: mol_type = other DNA
ccaggacacggagctcgtgg

SEQ ID NO: 19659 - DNA, 20 bp, synthetic construct
  misc_feature 1..20: note = Artificial sequence related to HLA knockouts in cell therapy
  source 1..20: mol_type = other DNA
caggacacggagctcgtgga

SEQ ID NO: 19660 - DNA, 20 bp, synthetic construct
  misc_feature 1..20: note = Artificial sequence related to HLA knockouts in cell therapy
  source 1..20: mol_type = other DNA
aggacacggagctcgtggag

SEQ ID NO: 19661 - DNA, 20 bp, synthetic construct
  misc_feature 1..20: note = Artificial sequence related to HLA knockouts in cell therapy
  source 1..20: mol_type = other DNA
ggacacggagctcgtggaga

SEQ ID NO: 19662 - DNA, 20 bp, synthetic construct
  misc_feature 1..20: note = Artificial sequence related to HLA knockouts in cell therapy
  source 1..20: mol_type = other DNA
gacacggagctcgtggagac

SEQ ID NO: 19663 - DNA, 20 bp, synthetic construct
  misc_feature 1..20: note = Artificial sequence related to HLA knockouts in cell therapy
  source 1..20: mol_type = other DNA
acacggagctcgtggagacc

SEQ ID NO: 19664 - DNA, 20 bp, synthetic construct
  misc_feature 1..20: note = Artificial sequence related to HLA knockouts in cell therapy
  source 1..20: mol_type = other DNA
cacggagctcgtggagacca

SEQ ID NO: 19665 - DNA, 20 bp, synthetic construct
  misc_feature 1..20: note = Artificial sequence related to HLA knockouts in cell therapy
  source 1..20: mol_type = other DNA
acggagctcgtggagaccag

SEQ ID NO: 19666 - DNA, 20 bp, synthetic construct
  misc_feature 1..20: note = Artificial sequence related to HLA knockouts in cell therapy
  source 1..20: mol_type = other DNA
cggagctcgtggagaccagg

SEQ ID NO: 19667 - DNA, 20 bp, synthetic construct
  misc_feature 1..20: note = Artificial sequence related to HLA knockouts in cell therapy
  source 1..20: mol_type = other DNA
ggagctcgtggagaccaggc

SEQ ID NO: 19668 - DNA, 20 bp, synthetic construct
  misc_feature 1..20: note = Artificial sequence related to HLA knockouts in cell therapy
  source 1..20: mol_type = other DNA
gagctcgtggagaccaggcc

SEQ ID NO: 19669 - DNA, 20 bp, synthetic construct
  misc_feature 1..20: note = Artificial sequence related to HLA knockouts in cell therapy
  source 1..20: mol_type = other DNA
agctcgtggagaccaggcct

SEQ ID NO: 19670 - DNA, 20 bp, synthetic construct
  misc_feature 1..20: note = Artificial sequence related to HLA knockouts in cell therapy
  source 1..20: mol_type = other DNA
gctcgtggagaccaggcctg

SEQ ID NO: 19671 - DNA, 20 bp, synthetic construct
  misc_feature 1..20: note = Artificial sequence related to HLA knockouts in cell therapy
  source 1..20: mol_type = other DNA
ctcgtggagaccaggcctgc

SEQ ID NO: 19672 - DNA, 20 bp, synthetic construct
  misc_feature 1..20: note = Artificial sequence related to HLA knockouts in cell therapy
  source 1..20: mol_type = other DNA
tcgtggagaccaggcctgca

SEQ ID NO: 19673 - DNA, 20 bp, synthetic construct
  misc_feature 1..20: note = Artificial sequence related to HLA knockouts in cell therapy
  source 1..20: mol_type = other DNA
cgtggagaccaggcctgcag

SEQ ID NO: 19674 - DNA, 20 bp, synthetic construct
  misc_feature 1..20: note = Artificial sequence related to HLA knockouts in cell therapy
  source 1..20: mol_type = other DNA
gtggagaccaggcctgcagg

SEQ ID NO: 19675 - DNA, 20 bp, synthetic construct
  misc_feature 1..20: note = Artificial sequence related to HLA knockouts in cell therapy
  source 1..20: mol_type = other DNA
tggagaccaggcctgcaggg

SEQ ID NO: 19676 - DNA, 20 bp, synthetic construct
  misc_feature 1..20: note = Artificial sequence related to HLA knockouts in cell therapy
  source 1..20: mol_type = other DNA
ggagaccaggcctgcagggg

SEQ ID NO: 19677 - DNA, 20 bp, synthetic construct
  misc_feature 1..20: note = Artificial sequence related to HLA knockouts in cell therapy
  source 1..20: mol_type = other DNA
gagaccaggcctgcagggga

SEQ ID NO: 19678 - DNA, 20 bp, synthetic construct
  misc_feature 1..20: note = Artificial sequence related to HLA knockouts in cell therapy
  source 1..20: mol_type = other DNA
agaccaggcctgcaggggat

SEQ ID NO: 19679 - DNA, 20 bp, synthetic construct
  misc_feature 1..20: note = Artificial sequence related to HLA knockouts in cell therapy
  source 1..20: mol_type = other DNA
gaccaggcctgcaggggatg

SEQ ID NO: 19680 - DNA, 20 bp, synthetic construct
  misc_feature 1..20: note = Artificial sequence related to HLA knockouts in cell therapy
  source 1..20: mol_type = other DNA
accaggcctgcaggggatgg

SEQ ID NO: 19681 - DNA, 20 bp, synthetic construct
  misc_feature 1..20: note = Artificial sequence related to HLA knockouts in cell therapy
  source 1..20: mol_type = other DNA
ccaggcctgcaggggatgga

SEQ ID NO: 19682 - DNA, 20 bp, synthetic construct
  misc_feature 1..20: note = Artificial sequence related to HLA knockouts in cell therapy
  source 1..20: mol_type = other DNA
caggcctgcaggggatggaa

SEQ ID NO: 19683 - DNA, 20 bp, synthetic construct
  misc_feature 1..20: note = Artificial sequence related to HLA knockouts in cell therapy
  source 1..20: mol_type = other DNA
aggcctgcaggggatggaac

SEQ ID NO: 19684 - DNA, 20 bp, synthetic construct
  misc_feature 1..20: note = Artificial sequence related to HLA knockouts in cell therapy
  source 1..20: mol_type = other DNA
ggcctgcaggggatggaacc

SEQ ID NO: 19685 - DNA, 20 bp, synthetic construct
  misc_feature 1..20: note = Artificial sequence related to HLA knockouts in cell therapy
  source 1..20: mol_type = other DNA
gcctgcaggggatggaacct

SEQ ID NO: 19686 - DNA, 20 bp, synthetic construct
  misc_feature 1..20: note = Artificial sequence related to HLA knockouts in cell therapy
  source 1..20: mol_type = other DNA
cctgcaggggatggaacctt

SEQ ID NO: 19687 - DNA, 20 bp, synthetic construct
  misc_feature 1..20: note = Artificial sequence related to HLA knockouts in cell therapy
  source 1..20: mol_type = other DNA
ctgcaggggatggaaccttc

SEQ ID NO: 19688 - DNA, 20 bp, synthetic construct
  misc_feature 1..20: note = Artificial sequence related to HLA knockouts in cell therapy
  source 1..20: mol_type = other DNA
tgcaggggatggaaccttcc

SEQ ID NO: 19689 - DNA, 20 bp, synthetic construct
  misc_feature 1..20: note = Artificial sequence related to HLA knockouts in cell therapy
  source 1..20: mol_type = other DNA
gcaggggatggaaccttcca

SEQ ID NO: 19690 - DNA, 20 bp, synthetic construct
  misc_feature 1..20: note = Artificial sequence related to HLA knockouts in cell therapy
  source 1..20: mol_type = other DNA
caggggatggaaccttccag

SEQ ID NO: 19691 - DNA, 20 bp, synthetic construct
  misc_feature 1..20: note = Artificial sequence related to HLA knockouts in cell therapy
  source 1..20: mol_type = other DNA
ggaaccttccagaagtgggc

SEQ ID NO: 19692 - DNA, 20 bp, synthetic construct
  misc_feature 1..20: note = Artificial sequence related to HLA knockouts in cell therapy
  source 1..20: mol_type = other DNA
gaaccttccagaagtgggcg

SEQ ID NO: 19693 - DNA, 20 bp, synthetic construct
  misc_feature 1..20: note = Artificial sequence related to HLA knockouts in cell therapy
  source 1..20: mol_type = other DNA
aaccttccagaagtgggcgg

SEQ ID NO: 19694 - DNA, 20 bp, synthetic construct
  misc_feature 1..20: note = Artificial sequence related to HLA knockouts in cell therapy
  source 1..20: mol_type = other DNA
accttccagaagtgggcggc

SEQ ID NO: 19695 - DNA, 20 bp, synthetic construct
  misc_feature 1..20: note = Artificial sequence related to HLA knockouts in cell therapy
  source 1..20: mol_type = other DNA
ccttccagaagtgggcggct

SEQ ID NO: 19696 - DNA, 20 bp, synthetic construct
  misc_feature 1..20: note = Artificial sequence related to HLA knockouts in cell therapy
  source 1..20: mol_type = other DNA
cttccagaagtgggcggctg

SEQ ID NO: 19697 - DNA, 20 bp, synthetic construct
  misc_feature 1..20: note = Artificial sequence related to HLA knockouts in cell therapy
  source 1..20: mol_type = other DNA
ttccagaagtgggcggctgt

SEQ ID NO: 19698 - DNA, 20 bp, synthetic construct
  misc_feature 1..20: note = Artificial sequence related to HLA knockouts in cell therapy
  source 1..20: mol_type = other DNA
tccagaagtgggcggctgtg

SEQ ID NO: 19699 - DNA, 20 bp, synthetic construct
  misc_feature 1..20: note = Artificial sequence related to HLA knockouts in cell therapy
  source 1..20: mol_type = other DNA
ccagaagtgggcggctgtgg

SEQ ID NO: 19700 - DNA, 20 bp, synthetic construct
  misc_feature 1..20: note = Artificial sequence related to HLA knockouts in cell therapy
  source 1..20: mol_type = other DNA
cagaagtgggcggctgtggt

SEQ ID NO: 19701 - DNA, 20 bp, synthetic construct
  misc_feature 1..20: note = Artificial sequence related to HLA knockouts in cell therapy
  source 1..20: mol_type = other DNA
agaagtgggcggctgtggtg

SEQ ID NO: 19702 - DNA, 20 bp, synthetic construct
  misc_feature 1..20: note = Artificial sequence related to HLA knockouts in cell therapy
  source 1..20: mol_type = other DNA
gaagtgggcggctgtggtgg

SEQ ID NO: 19703 - DNA, 20 bp, synthetic construct
  misc_feature 1..20: note = Artificial sequence related to HLA knockouts in cell therapy
  source 1..20: mol_type = other DNA
aagtgggcggctgtggtggt

SEQ ID NO: 19704 - DNA, 20 bp, synthetic construct
  misc_feature 1..20: note = Artificial sequence related to HLA knockouts in cell therapy
  source 1..20: mol_type = other DNA
agtgggcggctgtggtggtg

SEQ ID NO: 19705 - DNA, 20 bp, synthetic construct
  misc_feature 1..20: note = Artificial sequence related to HLA knockouts in cell therapy
  source 1..20: mol_type = other DNA
gtgggcggctgtggtggtgc

SEQ ID NO: 19706 - DNA, 20 bp, synthetic construct
  misc_feature 1..20: note = Artificial sequence related to HLA knockouts in cell therapy
  source 1..20: mol_type = other DNA
tgggcggctgtggtggtgcc

SEQ ID NO: 19707 - DNA, 20 bp, synthetic construct
  misc_feature 1..20: note = Artificial sequence related to HLA knockouts in cell therapy
  source 1..20: mol_type = other DNA
gggcggctgtggtggtgcct

SEQ ID NO: 19708 - DNA, 20 bp, synthetic construct
  misc_feature 1..20: note = Artificial sequence related to HLA knockouts in cell therapy
  source 1..20: mol_type = other DNA
ggcggctgtggtggtgcctt

SEQ ID NO: 19709 - DNA, 20 bp, synthetic construct
  misc_feature 1..20: note = Artificial sequence related to HLA knockouts in cell therapy
  source 1..20: mol_type = other DNA
gcggctgtggtggtgccttc

SEQ ID NO: 19710 - DNA, 20 bp, synthetic construct
  misc_feature 1..20: note = Artificial sequence related to HLA knockouts in cell therapy
  source 1..20: mol_type = other DNA
cggctgtggtggtgccttct

SEQ ID NO: 19711 - DNA, 20 bp, synthetic construct
  misc_feature 1..20: note = Artificial sequence related to HLA knockouts in cell therapy
  source 1..20: mol_type = other DNA
ggctgtggtggtgccttctg

SEQ ID NO: 19712 - DNA, 20 bp, synthetic construct
  misc_feature 1..20: note = Artificial sequence related to HLA knockouts in cell therapy
  source 1..20: mol_type = other DNA
ctgtggtggtgccttctgga

SEQ ID NO: 19713 - DNA, 20 bp, synthetic construct
  misc_feature 1..20: note = Artificial sequence related to HLA knockouts in cell therapy
  source 1..20: mol_type = other DNA
tgtggtggtgccttctggac

SEQ ID NO: 19714 - DNA, 20 bp, synthetic construct
  misc_feature 1..20: note = Artificial sequence related to HLA knockouts in cell therapy
  source 1..20: mol_type = other DNA
gtggtggtgccttctggaca

SEQ ID NO: 19715 - DNA, 20 bp, synthetic construct
  misc_feature 1..20: note = Artificial sequence related to HLA knockouts in cell therapy
  source 1..20: mol_type = other DNA
tggtggtgccttctggacag

SEQ ID NO: 19716 - DNA, 20 bp, synthetic construct
  misc_feature 1..20: note = Artificial sequence related to HLA knockouts in cell therapy
  source 1..20: mol_type = other DNA
ggtggtgccttctggacagg

SEQ ID NO: 19717 - DNA, 20 bp, synthetic construct
  misc_feature 1..20: note = Artificial sequence related to HLA knockouts in cell therapy
  source 1..20: mol_type = other DNA
gtggtgccttctggacagga

SEQ ID NO: 19718 - DNA, 20 bp, synthetic construct
  misc_feature 1..20: note = Artificial sequence related to HLA knockouts in cell therapy
  source 1..20: mol_type = other DNA
tggtgccttctggacaggag

SEQ ID NO: 19719 - DNA, 20 bp, synthetic construct
  misc_feature 1..20: note = Artificial sequence related to HLA knockouts in cell therapy
  source 1..20: mol_type = other DNA
ggtgccttctggacaggagc

SEQ ID NO: 19720 - DNA, 20 bp, synthetic construct
  misc_feature 1..20: note = Artificial sequence related to HLA knockouts in cell therapy
  source 1..20: mol_type = other DNA
gtgccttctggacaggagca

SEQ ID NO: 19721 - DNA, 20 bp, synthetic construct
  misc_feature 1..20: note = Artificial sequence related to HLA knockouts in cell therapy
  source 1..20: mol_type = other DNA
tgccttctggacaggagcag

SEQ ID NO: 19722 - DNA, 20 bp, synthetic construct
  misc_feature 1..20: note = Artificial sequence related to HLA knockouts in cell therapy
  source 1..20: mol_type = other DNA
gccttctggacaggagcaga

SEQ ID NO: 19723 - DNA, 20 bp, synthetic construct
  misc_feature 1..20: note = Artificial sequence related to HLA knockouts in cell therapy
  source 1..20: mol_type = other DNA
ccttctggacaggagcagag

SEQ ID NO: 19724 - DNA, 20 bp, synthetic construct
  misc_feature 1..20: note = Artificial sequence related to HLA knockouts in cell therapy
  source 1..20: mol_type = other DNA
ggagcagagatacacctgcc

SEQ ID NO: 19725 - DNA, 20 bp, synthetic construct
  misc_feature 1..20: note = Artificial sequence related to HLA knockouts in cell therapy
  source 1..20: mol_type = other DNA
cacctgccatgtgcagcatg

SEQ ID NO: 19726 - DNA, 20 bp, synthetic construct
  misc_feature 1..20: note = Artificial sequence related to HLA knockouts in cell therapy
  source 1..20: mol_type = other DNA
cctgccatgtgcagcatgag

SEQ ID NO: 19727 - DNA, 20 bp, synthetic construct
  misc_feature 1..20: note = Artificial sequence related to HLA knockouts in cell therapy
  source 1..20: mol_type = other DNA
ctgccatgtgcagcatgagg

SEQ ID NO: 19728 - DNA, 20 bp, synthetic construct
  misc_feature 1..20: note = Artificial sequence related to HLA knockouts in cell therapy
  source 1..20: mol_type = other DNA
tgccatgtgcagcatgaggg

SEQ ID NO: 19729 - DNA, 20 bp, synthetic construct
  misc_feature 1..20: note = Artificial sequence related to HLA knockouts in cell therapy
  source 1..20: mol_type = other DNA
gccatgtgcagcatgagggt

SEQ ID NO: 19730 - DNA, 20 bp, synthetic construct
  misc_feature 1..20: note = Artificial sequence related to HLA knockouts in cell therapy
  source 1..20: mol_type = other DNA
gtgcagcatgagggtttgcc

SEQ ID NO: 19731 - DNA, 20 bp, synthetic construct
  misc_feature 1..20: note = Artificial sequence related to HLA knockouts in cell therapy
  source 1..20: mol_type = other DNA
tgcagcatgagggtttgccc

SEQ ID NO: 19732 - DNA, 20 bp, synthetic construct
  misc_feature 1..20: note = Artificial sequence related to HLA knockouts in cell therapy
  source 1..20: mol_type = other DNA
gcagcatgagggtttgccca

SEQ ID NO: 19733 - DNA, 20 bp, synthetic construct
  misc_feature 1..20: note = Artificial sequence related to HLA knockouts in cell therapy
  source 1..20: mol_type = other DNA
gcatgagggtttgcccaagc

SEQ ID NO: 19734 - DNA, 20 bp, synthetic construct
  misc_feature 1..20: note = Artificial sequence related to HLA knockouts in cell therapy
  source 1..20: mol_type = other DNA
catgagggtttgcccaagcc

SEQ ID NO: 19735 - DNA, 20 bp, synthetic construct
  misc_feature 1..20: note = Artificial sequence related to HLA knockouts in cell therapy
  source 1..20: mol_type = other DNA
atgagggtttgcccaagccc

SEQ ID NO: 19736 - DNA, 20 bp, synthetic construct
  misc_feature 1..20: note = Artificial sequence related to HLA knockouts in cell therapy
  source 1..20: mol_type = other DNA
tgagggtttgcccaagcccc

SEQ ID NO: 19737 - DNA, 20 bp, synthetic construct
  misc_feature 1..20: note = Artificial sequence related to HLA knockouts in cell therapy
  source 1..20: mol_type = other DNA
gagggtttgcccaagcccct

SEQ ID NO: 19738 - DNA, 20 bp, synthetic construct
  misc_feature 1..20: note = Artificial sequence related to HLA knockouts in cell therapy
  source 1..20: mol_type = other DNA
agggtttgcccaagcccctc

SEQ ID NO: 19739 - DNA, 20 bp, synthetic construct
  misc_feature 1..20: note = Artificial sequence related to HLA knockouts in cell therapy
  source 1..20: mol_type = other DNA
gggtttgcccaagcccctca

SEQ ID NO: 19740 - DNA, 20 bp, synthetic construct
  misc_feature 1..20: note = Artificial sequence related to HLA knockouts in cell therapy
  source 1..20: mol_type = other DNA
ggtttgcccaagcccctcac

SEQ ID NO: 19741 - DNA, 20 bp, synthetic construct
  misc_feature 1..20: note = Artificial sequence related to HLA knockouts in cell therapy
  source 1..20: mol_type = other DNA
gtttgcccaagcccctcacc

SEQ ID NO: 19742 - DNA, 20 bp, synthetic construct
  misc_feature 1..20: note = Artificial sequence related to HLA knockouts in cell therapy
  source 1..20: mol_type = other DNA
tttgcccaagcccctcaccc

SEQ ID NO: 19743 - DNA, 20 bp, synthetic construct
  misc_feature 1..20: note = Artificial sequence related to HLA knockouts in cell therapy
  source 1..20: mol_type = other DNA
ttgcccaagcccctcaccct

SEQ ID NO: 19744 - DNA, 20 bp, synthetic construct
  misc_feature 1..20: note = Artificial sequence related to HLA knockouts in cell therapy
  source 1..20: mol_type = other DNA
tgcccaagcccctcaccctg

SEQ ID NO: 19745 - DNA, 20 bp, synthetic construct
  misc_feature 1..20: note = Artificial sequence related to HLA knockouts in cell therapy
  source 1..20: mol_type = other DNA
gcccaagcccctcaccctga

SEQ ID NO: 19746 - DNA, 20 bp, synthetic construct
  misc_feature 1..20: note = Artificial sequence related to HLA knockouts in cell therapy
  source 1..20: mol_type = other DNA
cccaagcccctcaccctgag

SEQ ID NO: 19747 - DNA, 20 bp, synthetic construct
  misc_feature 1..20: note = Artificial sequence related to HLA knockouts in cell therapy
  source 1..20: mol_type = other DNA
ccaagcccctcaccctgaga

SEQ ID NO: 19748 - DNA, 20 bp, synthetic construct
  misc_feature 1..20: note = Artificial sequence related to HLA knockouts in cell therapy
  source 1..20: mol_type = other DNA
caagcccctcaccctgagat

SEQ ID NO: 19749 - DNA, 20 bp, synthetic construct
  misc_feature 1..20: note = Artificial sequence related to HLA knockouts in cell therapy
  source 1..20: mol_type = other DNA
aagcccctcaccctgagatg

SEQ ID NO: 19750 - DNA, 20 bp, synthetic construct
  misc_feature 1..20: note = Artificial sequence related to HLA knockouts in cell therapy
  source 1..20: mol_type = other DNA
agcccctcaccctgagatgg

SEQ ID NO: 19751 - DNA, 20 bp, synthetic construct
  misc_feature 1..20: note = Artificial sequence related to HLA knockouts in cell therapy
  source 1..20: mol_type = other DNA
gcccctcaccctgagatggg

SEQ ID NO: 19752 - DNA, 20 bp, synthetic construct
  misc_feature 1..20: note = Artificial sequence related to HLA knockouts in cell therapy
  source 1..20: mol_type = other DNA
cccctcaccctgagatggga

SEQ ID NO: 19753 - DNA, 20 bp, synthetic construct
  misc_feature 1..20: note = Artificial sequence related to HLA knockouts in cell therapy
  source 1..20: mol_type = other DNA
ccctcaccctgagatgggag

SEQ ID NO: 19754 - DNA, 20 bp, synthetic construct
  misc_feature 1..20: note = Artificial sequence related to HLA knockouts in cell therapy
  source 1..20: mol_type = other DNA
cctcaccctgagatgggagc

SEQ ID NO: 19755 - DNA, 20 bp, synthetic construct
  misc_feature 1..20: note = Artificial sequence related to HLA knockouts in cell therapy
  source 1..20: mol_type = other DNA
ctcaccctgagatgggagcc

SEQ ID NO: 19756 - DNA, 20 bp, synthetic construct
  misc_feature 1..20: note = Artificial sequence related to HLA knockouts in cell therapy
  source 1..20: mol_type = other DNA
tcaccctgagatgggagccg

SEQ ID NO: 19757 - DNA, 20 bp, synthetic construct
  misc_feature 1..20: note = Artificial sequence related to HLA knockouts in cell therapy
  source 1..20: mol_type = other DNA
caccctgagatgggagccgt

SEQ ID NO: 19758 - DNA, 20 bp, synthetic construct
  misc_feature 1..20: note = Artificial sequence related to HLA knockouts in cell therapy
  source 1..20: mol_type = other DNA
accctgagatgggagccgtc

SEQ ID NO: 19759 - DNA, 20 bp, synthetic construct
  misc_feature 1..20: note = Artificial sequence related to HLA knockouts in cell therapy
  source 1..20: mol_type = other DNA
ccctgagatgggagccgtct

SEQ ID NO: 19760 - DNA, 20 bp, synthetic construct
  misc_feature 1..20: note = Artificial sequence related to HLA knockouts in cell therapy
  source 1..20: mol_type = other DNA
cctgagatgggagccgtctt

SEQ ID NO: 19761 - DNA, 20 bp, synthetic construct
  misc_feature 1..20: note = Artificial sequence related to HLA knockouts in cell therapy
  source 1..20: mol_type = other DNA
ctgagatgggagccgtcttc

SEQ ID NO: 19762 - DNA, 20 bp, synthetic construct
  misc_feature 1..20: note = Artificial sequence related to HLA knockouts in cell therapy
  source 1..20: mol_type = other DNA
tgagatgggagccgtcttcc

SEQ ID NO: 19763 - DNA, 20 bp, synthetic construct
  misc_feature 1..20: note = Artificial sequence related to HLA knockouts in cell therapy
  source 1..20: mol_type = other DNA
gagatgggagccgtcttccc

SEQ ID NO: 19764 - DNA, 20 bp, synthetic construct
  misc_feature 1..20: note = Artificial sequence related to HLA knockouts in cell therapy
  source 1..20: mol_type = other DNA
agatgggagccgtcttccca

SEQ ID NO: 19765 - DNA, 20 bp, synthetic construct
  misc_feature 1..20: note = Artificial sequence related to HLA knockouts in cell therapy
  source 1..20: mol_type = other DNA
gatgggagccgtcttcccag

SEQ ID NO: 19766 - DNA, 20 bp, synthetic construct
  misc_feature 1..20: note = Artificial sequence related to HLA knockouts in cell therapy
  source 1..20: mol_type = other DNA
atgggagccgtcttcccagc

SEQ ID NO: 19767 - DNA, 20 bp, synthetic construct
  misc_feature 1..20: note = Artificial sequence related to HLA knockouts in cell therapy
  source 1..20: mol_type = other DNA
tgggagccgtcttcccagcc

SEQ ID NO: 19768 - DNA, 20 bp, synthetic construct
  misc_feature 1..20: note = Artificial sequence related to HLA knockouts in cell therapy
  source 1..20: mol_type = other DNA
gggagccgtcttcccagccc

SEQ ID NO: 19769 - DNA, 20 bp, synthetic construct
  misc_feature 1..20: note = Artificial sequence related to HLA knockouts in cell therapy
  source 1..20: mol_type = other DNA
ggagccgtcttcccagccca

SEQ ID NO: 19770 - DNA, 20 bp, synthetic construct
  misc_feature 1..20: note = Artificial sequence related to HLA knockouts in cell therapy
  source 1..20: mol_type = other DNA
gagccgtcttcccagcccac

SEQ ID NO: 19771 - DNA, 20 bp, synthetic construct
  misc_feature 1..20: note = Artificial sequence related to HLA knockouts in cell therapy
  source 1..20: mol_type = other DNA
agccgtcttcccagcccacc

SEQ ID NO: 19772 - DNA, 20 bp, synthetic construct
  misc_feature 1..20: note = Artificial sequence related to HLA knockouts in cell therapy
  source 1..20: mol_type = other DNA
gccgtcttcccagcccacca

SEQ ID NO: 19773 - DNA, 20 bp, synthetic construct
  misc_feature 1..20: note = Artificial sequence related to HLA knockouts in cell therapy
  source 1..20: mol_type = other DNA
ccgtcttcccagcccaccat

SEQ ID NO: 19774 - DNA, 20 bp, synthetic construct
  misc_feature 1..20: note = Artificial sequence related to HLA knockouts in cell therapy
  source 1..20: mol_type = other DNA
cgtcttcccagcccaccatc

SEQ ID NO: 19775 - DNA, 20 bp, synthetic construct
  misc_feature 1..20: note = Artificial sequence related to HLA knockouts in cell therapy
  source 1..20: mol_type = other DNA
gtcttcccagcccaccatcc

SEQ ID NO: 19776 - DNA, 20 bp, synthetic construct
  misc_feature 1..20: note = Artificial sequence related to HLA knockouts in cell therapy
  source 1..20: mol_type = other DNA
tcttcccagcccaccatccc

SEQ ID NO: 19777 - DNA, 20 bp, synthetic construct
  misc_feature 1..20: note = Artificial sequence related to HLA knockouts in cell therapy
  source 1..20: mol_type = other DNA
cttcccagcccaccatcccc

SEQ ID NO: 19778 - DNA, 20 bp, synthetic construct
  misc_feature 1..20: note = Artificial sequence related to HLA knockouts in cell therapy
  source 1..20: mol_type = other DNA
ttcccagcccaccatcccca

SEQ ID NO: 19779 - DNA, 20 bp, synthetic construct
  misc_feature 1..20: note = Artificial sequence related to HLA knockouts in cell therapy
  source 1..20: mol_type = other DNA
tcccagcccaccatccccat

SEQ ID NO: 19780 - DNA, 20 bp, synthetic construct
  misc_feature 1..20: note = Artificial sequence related to HLA knockouts in cell therapy
  source 1..20: mol_type = other DNA
cccagcccaccatccccatc

SEQ ID NO: 19781 - DNA, 20 bp, synthetic construct
  misc_feature 1..20: note = Artificial sequence related to HLA knockouts in cell therapy
  source 1..20: mol_type = other DNA
ccagcccaccatccccatcg

SEQ ID NO: 19782 - DNA, 20 bp, synthetic construct
  misc_feature 1..20: note = Artificial sequence related to HLA knockouts in cell therapy
  source 1..20: mol_type = other DNA
cagcccaccatccccatcgt

SEQ ID NO: 19783 - DNA, 20 bp, synthetic construct
  misc_feature 1..20: note = Artificial sequence related to HLA knockouts in cell therapy
  source 1..20: mol_type = other DNA
agcccaccatccccatcgtg

SEQ ID NO: 19784 - DNA, 20 bp, synthetic construct
  misc_feature 1..20: note = Artificial sequence related to HLA knockouts in cell therapy
  source 1..20: mol_type = other DNA
gcccaccatccccatcgtgg

SEQ ID NO: 19785 - DNA, 20 bp, synthetic construct
  misc_feature 1..20: note = Artificial sequence related to HLA knockouts in cell therapy
  source 1..20: mol_type = other DNA
cccaccatccccatcgtggg

SEQ ID NO: 19786 - DNA, 20 bp, synthetic construct
  misc_feature 1..20: note = Artificial sequence related to HLA knockouts in cell therapy
  source 1..20: mol_type = other DNA
ccaccatccccatcgtgggc

SEQ ID NO: 19787 - DNA, 20 bp, synthetic construct
  misc_feature 1..20: note = Artificial sequence related to HLA knockouts in cell therapy
  source 1..20: mol_type = other DNA
caccatccccatcgtgggca

SEQ ID NO: 19788 - DNA, 20 bp, synthetic construct
  misc_feature 1..20: note = Artificial sequence related to HLA knockouts in cell therapy
  source 1..20: mol_type = other DNA
accatccccatcgtgggcat

SEQ ID NO: 19789 - DNA, 20 bp, synthetic construct
  misc_feature 1..20: note = Artificial sequence related to HLA knockouts in cell therapy
  source 1..20: mol_type = other DNA
ccatccccatcgtgggcatc

SEQ ID NO: 19790 - DNA, 20 bp, synthetic construct
  misc_feature 1..20: note = Artificial sequence related to HLA knockouts in cell therapy
  source 1..20: mol_type = other DNA
catccccatcgtgggcatca

SEQ ID NO: 19791 - DNA, 20 bp, synthetic construct
  misc_feature 1..20: note = Artificial sequence related to HLA knockouts in cell therapy
  source 1..20: mol_type = other DNA
ccccatcgtgggcatcattg

SEQ ID NO: 19792 - DNA, 20 bp, synthetic construct
  misc_feature 1..20: note = Artificial sequence related to HLA knockouts in cell therapy
  source 1..20: mol_type = other DNA
cccatcgtgggcatcattgc

SEQ ID NO: 19793 - DNA, 20 bp, synthetic construct
  misc_feature 1..20: note = Artificial sequence related to HLA knockouts in cell therapy
  source 1..20: mol_type = other DNA
tcgtgggcatcattgctggc

SEQ ID NO: 19794 - DNA, 20 bp, synthetic construct
  misc_feature 1..20: note = Artificial sequence related to HLA knockouts in cell therapy
  source 1..20: mol_type = other DNA
cgtgggcatcattgctggcc

SEQ ID NO: 19795 - DNA, 20 bp, synthetic construct
  misc_feature 1..20: note = Artificial sequence related to HLA knockouts in cell therapy
  source 1..20: mol_type = other DNA
gtgggcatcattgctggcct

SEQ ID NO: 19796 - DNA, 20 bp, synthetic construct
  misc_feature 1..20: note = Artificial sequence related to HLA knockouts in cell therapy
  source 1..20: mol_type = other DNA
tgggcatcattgctggcctg

SEQ ID NO: 19797 - DNA, 20 bp, synthetic construct
  misc_feature 1..20: note = Artificial sequence related to HLA knockouts in cell therapy
  source 1..20: mol_type = other DNA
gggcatcattgctggcctgg

SEQ ID NO: 19798 - DNA, 20 bp, synthetic construct
  misc_feature 1..20: note = Artificial sequence related to HLA knockouts in cell therapy
  source 1..20: mol_type = other DNA
ggcatcattgctggcctggt

SEQ ID NO: 19799 - DNA, 20 bp, synthetic construct
  misc_feature 1..20: note = Artificial sequence related to HLA knockouts in cell therapy
  source 1..20: mol_type = other DNA
gctggcctggttctctttgg

SEQ ID NO: 19800 - DNA, 20 bp, synthetic construct
  misc_feature 1..20: note = Artificial sequence related to HLA knockouts in cell therapy
  source 1..20: mol_type = other DNA
ggcctggttctctttggagc

SEQ ID NO: 19801 - DNA, 20 bp, synthetic construct
  misc_feature 1..20: note = Artificial sequence related to HLA knockouts in cell therapy
  source 1..20: mol_type = other DNA
ggagctgtgatcactggagc

SEQ ID NO: 19802 - DNA, 20 bp, synthetic construct
  misc_feature 1..20: note = Artificial sequence related to HLA knockouts in cell therapy
  source 1..20: mol_type = other DNA
gatcactggagctgtggtcg

SEQ ID NO: 19803 - DNA, 20 bp, synthetic construct
  misc_feature 1..20: note = Artificial sequence related to HLA knockouts in cell therapy
  source 1..20: mol_type = other DNA
atcactggagctgtggtcgc

SEQ ID NO: 19804 - DNA, 20 bp, synthetic construct
  misc_feature 1..20: note = Artificial sequence related to HLA knockouts in cell therapy
  source 1..20: mol_type = other DNA
tcactggagctgtggtcgct

SEQ ID NO: 19805 - DNA, 20 bp, synthetic construct
  misc_feature 1..20: note = Artificial sequence related to HLA knockouts in cell therapy
  source 1..20: mol_type = other DNA
cactggagctgtggtcgctg

SEQ ID NO: 19806 - DNA, 20 bp, synthetic construct
  misc_feature 1..20: note = Artificial sequence related to HLA knockouts in cell therapy
  source 1..20: mol_type = other DNA
actggagctgtggtcgctgc

SEQ ID NO: 19807 - DNA, 20 bp, synthetic construct
  misc_feature 1..20: note = Artificial sequence related to HLA knockouts in cell therapy
  source 1..20: mol_type = other DNA
ctggagctgtggtcgctgct

SEQ ID NO: 19808 - DNA, 20 bp, synthetic construct
  misc_feature 1..20: note = Artificial sequence related to HLA knockouts in cell therapy
  source 1..20: mol_type = other DNA
tggagctgtggtcgctgctg

SEQ ID NO: 19809 - DNA, 20 bp, synthetic construct
  misc_feature 1..20: note = Artificial sequence related to HLA knockouts in cell therapy
  source 1..20: mol_type = other DNA
ggagctgtggtcgctgctgt

SEQ ID NO: 19810 - DNA, 20 bp, synthetic construct
  misc_feature 1..20: note = Artificial sequence related to HLA knockouts in cell therapy
  source 1..20: mol_type = other DNA
gagctgtggtcgctgctgtg

SEQ ID NO: 19811 - DNA, 20 bp, synthetic construct
  misc_feature 1..20: note = Artificial sequence related to HLA knockouts in cell therapy
  source 1..20: mol_type = other DNA
agctgtggtcgctgctgtga

SEQ ID NO: 19812 - DNA, 20 bp, synthetic construct
  misc_feature 1..20: note = Artificial sequence related to HLA knockouts in cell therapy
  source 1..20: mol_type = other DNA
gctgtggtcgctgctgtgat

SEQ ID NO: 19813 - DNA, 20 bp, synthetic construct
  misc_feature 1..20: note = Artificial sequence related to HLA knockouts in cell therapy
  source 1..20: mol_type = other DNA
ctgtggtcgctgctgtgatg

SEQ ID NO: 19814 - DNA, 20 bp, synthetic construct
  misc_feature 1..20: note = Artificial sequence related to HLA knockouts in cell therapy
  source 1..20: mol_type = other DNA
gtggtcgctgctgtgatgtg

SEQ ID NO: 19815 - DNA, 20 bp, synthetic construct
  misc_feature 1..20: note = Artificial sequence related to HLA knockouts in cell therapy
  source 1..20: mol_type = other DNA
tggtcgctgctgtgatgtgg

SEQ ID NO: 19816 - DNA, 20 bp, synthetic construct
  misc_feature 1..20: note = Artificial sequence related to HLA knockouts in cell therapy
  source 1..20: mol_type = other DNA
ggtcgctgctgtgatgtgga

SEQ ID NO: 19817 - DNA, 20 bp, synthetic construct
  misc_feature 1..20: note = Artificial sequence related to HLA knockouts in cell therapy
  source 1..20: mol_type = other DNA
gtcgctgctgtgatgtggag

SEQ ID NO: 19818 - DNA, 20 bp, synthetic construct
  misc_feature 1..20: note = Artificial sequence related to HLA knockouts in cell therapy
  source 1..20: mol_type = other DNA
tcgctgctgtgatgtggagg

SEQ ID NO: 19819 - DNA, 20 bp, synthetic construct
  misc_feature 1..20: note = Artificial sequence related to HLA knockouts in cell therapy
  source 1..20: mol_type = other DNA
cgctgctgtgatgtggagga

SEQ ID NO: 19820 - DNA, 20 bp, synthetic construct
  misc_feature 1..20: note = Artificial sequence related to HLA knockouts in cell therapy
  source 1..20: mol_type = other DNA
gctgctgtgatgtggaggag

SEQ ID NO: 19821 - DNA, 20 bp, synthetic construct
  misc_feature 1..20: note = Artificial sequence related to HLA knockouts in cell therapy
  source 1..20: mol_type = other DNA
ctgctgtgatgtggaggagg

SEQ ID NO: 19822 - DNA, 20 bp, synthetic construct
  misc_feature 1..20: note = Artificial sequence related to HLA knockouts in cell therapy
  source 1..20: mol_type = other DNA
gtggaggaggaagagctcag

SEQ ID NO: 19823 - DNA, 20 bp, synthetic construct
  misc_feature 1..20: note = Artificial sequence related to HLA knockouts in cell therapy
  source 1..20: mol_type = other DNA
aggagggagctactctcagg

SEQ ID NO: 19824 - DNA, 20 bp, synthetic construct
  misc_feature 1..20: note = Artificial sequence related to HLA knockouts in cell therapy
  source 1..20: mol_type = other DNA
ggagggagctactctcaggc

SEQ ID NO: 19825 - DNA, 20 bp, synthetic construct
  misc_feature 1..20: note = Artificial sequence related to HLA knockouts in cell therapy
  source 1..20: mol_type = other DNA
gagggagctactctcaggct

SEQ ID NO: 19826 - DNA, 20 bp, synthetic construct
  misc_feature 1..20: note = Artificial sequence related to HLA knockouts in cell therapy
  source 1..20: mol_type = other DNA
agggagctactctcaggctg

SEQ ID NO: 19827 - DNA, 20 bp, synthetic construct
  misc_feature 1..20: note = Artificial sequence related to HLA knockouts in cell therapy
  source 1..20: mol_type = other DNA
gggagctactctcaggctgc

SEQ ID NO: 19828 - DNA, 20 bp, synthetic construct
  misc_feature 1..20: note = Artificial sequence related to HLA knockouts in cell therapy
  source 1..20: mol_type = other DNA
ggagctactctcaggctgca

SEQ ID NO: 19829 - DNA, 20 bp, synthetic construct
  misc_feature 1..20: note = Artificial sequence related to HLA knockouts in cell therapy
  source 1..20: mol_type = other DNA
gctactctcaggctgcaagc

SEQ ID NO: 19830 - DNA, 20 bp, synthetic construct
  misc_feature 1..20: note = Artificial sequence related to HLA knockouts in cell therapy
  source 1..20: mol_type = other DNA
ctctcaggctgcaagcagtg

SEQ ID NO: 19831 - DNA, 20 bp, synthetic construct
  misc_feature 1..20: note = Artificial sequence related to HLA knockouts in cell therapy
  source 1..20: mol_type = other DNA
ctcaggctgcaagcagtgac

SEQ ID NO: 19832 - DNA, 20 bp, synthetic construct
  misc_feature 1..20: note = Artificial sequence related to HLA knockouts in cell therapy
  source 1..20: mol_type = other DNA
caggctgcaagcagtgacag

SEQ ID NO: 19833 - DNA, 20 bp, synthetic construct
  misc_feature 1..20: note = Artificial sequence related to HLA knockouts in cell therapy
  source 1..20: mol_type = other DNA
ggctgcaagcagtgacagtg

SEQ ID NO: 19834 - DNA, 20 bp, synthetic construct
  misc_feature 1..20: note = Artificial sequence related to HLA knockouts in cell therapy
  source 1..20: mol_type = other DNA
gctgcaagcagtgacagtgc

SEQ ID NO: 19835 - DNA, 20 bp, synthetic construct
  misc_feature 1..20: note = Artificial sequence related to HLA knockouts in cell therapy
  source 1..20: mol_type = other DNA
ctgcaagcagtgacagtgcc

SEQ ID NO: 19836 - DNA, 20 bp, synthetic construct
  misc_feature 1..20: note = Artificial sequence related to HLA knockouts in cell therapy
  source 1..20: mol_type = other DNA
tgcaagcagtgacagtgccc

SEQ ID NO: 19837 - DNA, 20 bp, synthetic construct
  misc_feature 1..20: note = Artificial sequence related to HLA knockouts in cell therapy
  source 1..20: mol_type = other DNA
gcaagcagtgacagtgccca

SEQ ID NO: 19838 - DNA, 20 bp, synthetic construct
  misc_feature 1..20: note = Artificial sequence related to HLA knockouts in cell therapy
  source 1..20: mol_type = other DNA
caagcagtgacagtgcccag

SEQ ID NO: 19839 - DNA, 20 bp, synthetic construct
  misc_feature 1..20: note = Artificial sequence related to HLA knockouts in cell therapy
  source 1..20: mol_type = other DNA
aagcagtgacagtgcccagg

SEQ ID NO: 19840 - DNA, 20 bp, synthetic construct
  misc_feature 1..20: note = Artificial sequence related to HLA knockouts in cell therapy
  source 1..20: mol_type = other DNA
agcagtgacagtgcccaggg

SEQ ID NO: 19841 - DNA, 20 bp, synthetic construct
  misc_feature 1..20: note = Artificial sequence related to HLA knockouts in cell therapy
  source 1..20: mol_type = other DNA
gcagtgacagtgcccagggc

SEQ ID NO: 19842 - DNA, 20 bp, synthetic construct
  misc_feature 1..20: note = Artificial sequence related to HLA knockouts in cell therapy
  source 1..20: mol_type = other DNA
cagtgacagtgcccagggct

SEQ ID NO: 19843 - DNA, 20 bp, synthetic construct
  misc_feature 1..20: note = Artificial sequence related to HLA knockouts in cell therapy
  source 1..20: mol_type = other DNA
agtgacagtgcccagggctc

SEQ ID NO: 19844 - DNA, 20 bp, synthetic construct
  misc_feature 1..20: note = Artificial sequence related to HLA knockouts in cell therapy
  source 1..20: mol_type = other DNA
gtgacagtgcccagggctct

SEQ ID NO: 19845 - DNA, 20 bp, synthetic construct
  misc_feature 1..20: note = Artificial sequence related to HLA knockouts in cell therapy
  source 1..20: mol_type = other DNA
tgacagtgcccagggctctg

SEQ ID NO: 19846 - DNA, 20 bp, synthetic construct
  misc_feature 1..20: note = Artificial sequence related to HLA knockouts in cell therapy
  source 1..20: mol_type = other DNA
gacagtgcccagggctctga

SEQ ID NO: 19847 - DNA, 20 bp, synthetic construct
  misc_feature 1..20: note = Artificial sequence related to HLA knockouts in cell therapy
  source 1..20: mol_type = other DNA
acagtgcccagggctctgat

SEQ ID NO: 19848 - DNA, 20 bp, synthetic construct
  misc_feature 1..20: note = Artificial sequence related to HLA knockouts in cell therapy
  source 1..20: mol_type = other DNA
cagtgcccagggctctgatg

SEQ ID NO: 19849 - DNA, 20 bp, synthetic construct
  misc_feature 1..20: note = Artificial sequence related to HLA knockouts in cell therapy
  source 1..20: mol_type = other DNA
agtgcccagggctctgatgt

SEQ ID NO: 19850 - DNA, 20 bp, synthetic construct
  misc_feature 1..20: note = Artificial sequence related to HLA knockouts in cell therapy
  source 1..20: mol_type = other DNA
gtgcccagggctctgatgtg

SEQ ID NO: 19851 - DNA, 20 bp, synthetic construct
  misc_feature 1..20: note = Artificial sequence related to HLA knockouts in cell therapy
  source 1..20: mol_type = other DNA
tgcccagggctctgatgtgt

SEQ ID NO: 19852 - DNA, 20 bp, synthetic construct
  misc_feature 1..20: note = Artificial sequence related to HLA knockouts in cell therapy
  source 1..20: mol_type = other DNA
gcccagggctctgatgtgtc

SEQ ID NO: 19853 - DNA, 20 bp, synthetic construct
  misc_feature 1..20: note = Artificial sequence related to HLA knockouts in cell therapy
  source 1..20: mol_type = other DNA
cccagggctctgatgtgtct

SEQ ID NO: 19854 - DNA, 20 bp, synthetic construct
  misc_feature 1..20: note = Artificial sequence related to HLA knockouts in cell therapy
  source 1..20: mol_type = other DNA
ccagggctctgatgtgtctc

SEQ ID NO: 19855 - DNA, 20 bp, synthetic construct
  misc_feature 1..20: note = Artificial sequence related to HLA knockouts in cell therapy
  source 1..20: mol_type = other DNA
gagacagctgccttgtgtgg

SEQ ID NO: 19856 - DNA, 20 bp, synthetic construct
  misc_feature 1..20: note = Artificial sequence related to HLA knockouts in cell therapy
  source 1..20: mol_type = other DNA
agacagctgccttgtgtggg

SEQ ID NO: 19857 - DNA, 20 bp, synthetic construct
  misc_feature 1..20: note = Artificial sequence related to HLA knockouts in cell therapy
  source 1..20: mol_type = other DNA
gacagctgccttgtgtggga

SEQ ID NO: 19858 - DNA, 20 bp, synthetic construct
  misc_feature 1..20: note = Artificial sequence related to HLA knockouts in cell therapy
  source 1..20: mol_type = other DNA
acagctgccttgtgtgggac

SEQ ID NO: 19859 - DNA, 20 bp, synthetic construct
  misc_feature 1..20: note = Artificial sequence related to HLA knockouts in cell therapy
  source 1..20: mol_type = other DNA
cagctgccttgtgtgggact

SEQ ID NO: 19860 - DNA, 20 bp, synthetic construct
  misc_feature 1..20: note = Artificial sequence related to HLA knockouts in cell therapy
  source 1..20: mol_type = other DNA
agctgccttgtgtgggactg

SEQ ID NO: 19861 - DNA, 20 bp, synthetic construct
  misc_feature 1..20: note = Artificial sequence related to HLA knockouts in cell therapy
  source 1..20: mol_type = other DNA
gctgccttgtgtgggactga

SEQ ID NO: 19862 - DNA, 20 bp, synthetic construct
  misc_feature 1..20: note = Artificial sequence related to HLA knockouts in cell therapy
  source 1..20: mol_type = other DNA
ctgccttgtgtgggactgag

SEQ ID NO: 19863 - DNA, 20 bp, synthetic construct
  misc_feature 1..20: note = Artificial sequence related to HLA knockouts in cell therapy
  source 1..20: mol_type = other DNA
gccttgtgtgggactgagag

SEQ ID NO: 19864 - DNA, 20 bp, synthetic construct
  misc_feature 1..20: note = Artificial sequence related to HLA knockouts in cell therapy
  source 1..20: mol_type = other DNA
ccttgtgtgggactgagagg

SEQ ID NO: 19865 - DNA, 20 bp, synthetic construct
  misc_feature 1..20: note = Artificial sequence related to HLA knockouts in cell therapy
  source 1..20: mol_type = other DNA
cttgtgtgggactgagaggc

SEQ ID NO: 19866 - DNA, 20 bp, synthetic construct
  misc_feature 1..20: note = Artificial sequence related to HLA knockouts in cell therapy
  source 1..20: mol_type = other DNA
gtgtgggactgagaggcaag

SEQ ID NO: 19867 - DNA, 20 bp, synthetic construct
  misc_feature 1..20: note = Artificial sequence related to HLA knockouts in cell therapy
  source 1..20: mol_type = other DNA
gtgggactgagaggcaagag

SEQ ID NO: 19868 - DNA, 20 bp, synthetic construct
  misc_feature 1..20: note = Artificial sequence related to HLA knockouts in cell therapy
  source 1..20: mol_type = other DNA
ggcaagagttgttcctgccc

SEQ ID NO: 19869 - DNA, 20 bp, synthetic construct
  misc_feature 1..20: note = Artificial sequence related to HLA knockouts in cell therapy
  source 1..20: mol_type = other DNA
gagttgttcctgcccttccc

SEQ ID NO: 19870 - DNA, 20 bp, synthetic construct
  misc_feature 1..20: note = Artificial sequence related to HLA knockouts in cell therapy
  source 1..20: mol_type = other DNA
cctgcccttccctttgtgac

SEQ ID NO: 19871 - DNA, 20 bp, synthetic construct
  misc_feature 1..20: note = Artificial sequence related to HLA knockouts in cell therapy
  source 1..20: mol_type = other DNA
ggcacctgcatgtgtctgtg

SEQ ID NO: 19872 - DNA, 20 bp, synthetic construct
  misc_feature 1..20: note = Artificial sequence related to HLA knockouts in cell therapy
  source 1..20: mol_type = other DNA
atgtgaggaggtggggagac

SEQ ID NO: 19873 - DNA, 20 bp, synthetic construct
  misc_feature 1..20: note = Artificial sequence related to HLA knockouts in cell therapy
  source 1..20: mol_type = other DNA
tgtgaggaggtggggagacc

SEQ ID NO: 19874 - DNA, 20 bp, synthetic construct
  misc_feature 1..20: note = Artificial sequence related to HLA knockouts in cell therapy
  source 1..20: mol_type = other DNA
gtgaggaggtggggagacca

SEQ ID NO: 19875 - DNA, 20 bp, synthetic construct
  misc_feature 1..20: note = Artificial sequence related to HLA knockouts in cell therapy
  source 1..20: mol_type = other DNA
tgaggaggtggggagaccac

SEQ ID NO: 19876 - DNA, 20 bp, synthetic construct
  misc_feature 1..20: note = Artificial sequence related to HLA knockouts in cell therapy
  source 1..20: mol_type = other DNA
gaggaggtggggagaccacc

SEQ ID NO: 19877 - DNA, 20 bp, synthetic construct
  misc_feature 1..20: note = Artificial sequence related to HLA knockouts in cell therapy
  source 1..20: mol_type = other DNA
aggaggtggggagaccaccc

SEQ ID NO: 19878 - DNA, 20 bp, synthetic construct
  misc_feature 1..20: note = Artificial sequence related to HLA knockouts in cell therapy
  source 1..20: mol_type = other DNA
ggaggtggggagaccacccc

SEQ ID NO: 19879 - DNA, 20 bp, synthetic construct
  misc_feature 1..20: note = Artificial sequence related to HLA knockouts in cell therapy
  source 1..20: mol_type = other DNA
gaggtggggagaccacccca

SEQ ID NO: 19880 - DNA, 20 bp, synthetic construct
  misc_feature 1..20: note = Artificial sequence related to HLA knockouts in cell therapy
  source 1..20: mol_type = other DNA
aggtggggagaccaccccac

SEQ ID NO: 19881 - DNA, 20 bp, synthetic construct
  misc_feature 1..20: note = Artificial sequence related to HLA knockouts in cell therapy
  source 1..20: mol_type = other DNA
ggtggggagaccaccccacc

SEQ ID NO: 19882 - DNA, 20 bp, synthetic construct
  misc_feature 1..20: note = Artificial sequence related to HLA knockouts in cell therapy
  source 1..20: mol_type = other DNA
gtggggagaccaccccaccc

SEQ ID NO: 19883 - DNA, 20 bp, synthetic construct
  misc_feature 1..20: note = Artificial sequence related to HLA knockouts in cell therapy
  source 1..20: mol_type = other DNA
tggggagaccaccccacccc

SEQ ID NO: 19884 - DNA, 20 bp, synthetic construct
  misc_feature 1..20: note = Artificial sequence related to HLA knockouts in cell therapy
  source 1..20: mol_type = other DNA
ggggagaccaccccaccccc

SEQ ID NO: 19885 - DNA, 20 bp, synthetic construct
  misc_feature 1..20: note = Artificial sequence related to HLA knockouts in cell therapy
  source 1..20: mol_type = other DNA
gggagaccaccccaccccca

SEQ ID NO: 19886 - DNA, 20 bp, synthetic construct
  misc_feature 1..20: note = Artificial sequence related to HLA knockouts in cell therapy
  source 1..20: mol_type = other DNA
ggagaccaccccacccccat

SEQ ID NO: 19887 - DNA, 20 bp, synthetic construct
  misc_feature 1..20: note = Artificial sequence related to HLA knockouts in cell therapy
  source 1..20: mol_type = other DNA
gagaccaccccacccccatg

SEQ ID NO: 19888 - DNA, 20 bp, synthetic construct
  misc_feature 1..20: note = Artificial sequence related to HLA knockouts in cell therapy
  source 1..20: mol_type = other DNA
agaccaccccacccccatgt

SEQ ID NO: 19889 - DNA, 20 bp, synthetic construct
  misc_feature 1..20: note = Artificial sequence related to HLA knockouts in cell therapy
  source 1..20: mol_type = other DNA
gaccaccccacccccatgtc

SEQ ID NO: 19890 - DNA, 20 bp, synthetic construct
  misc_feature 1..20: note = Artificial sequence related to HLA knockouts in cell therapy
  source 1..20: mol_type = other DNA
accaccccacccccatgtcc

SEQ ID NO: 19891 - DNA, 20 bp, synthetic construct
  misc_feature 1..20: note = Artificial sequence related to HLA knockouts in cell therapy
  source 1..20: mol_type = other DNA
ccaccccacccccatgtcca

SEQ ID NO: 19892 - DNA, 20 bp, synthetic construct
  misc_feature 1..20: note = Artificial sequence related to HLA knockouts in cell therapy
  source 1..20: mol_type = other DNA
caccccacccccatgtccac

SEQ ID NO: 19893 - DNA, 20 bp, synthetic construct
  misc_feature 1..20: note = Artificial sequence related to HLA knockouts in cell therapy
  source 1..20: mol_type = other DNA
accccacccccatgtccacc

SEQ ID NO: 19894 - DNA, 20 bp, synthetic construct
  misc_feature 1..20: note = Artificial sequence related to HLA knockouts in cell therapy
  source 1..20: mol_type = other DNA
ccccacccccatgtccacca

SEQ ID NO: 19895 - DNA, 20 bp, synthetic construct
  misc_feature 1..20: note = Artificial sequence related to HLA knockouts in cell therapy
  source 1..20: mol_type = other DNA
cccacccccatgtccaccat

SEQ ID NO: 19896 - DNA, 20 bp, synthetic construct
  misc_feature 1..20: note = Artificial sequence related to HLA knockouts in cell therapy
  source 1..20: mol_type = other DNA
ccacccccatgtccaccatg

SEQ ID NO: 19897 - DNA, 20 bp, synthetic construct
  misc_feature 1..20: note = Artificial sequence related to HLA knockouts in cell therapy
  source 1..20: mol_type = other DNA
cacccccatgtccaccatga

SEQ ID NO: 19898 - DNA, 20 bp, synthetic construct
  misc_feature 1..20: note = Artificial sequence related to HLA knockouts in cell therapy
  source 1..20: mol_type = other DNA
acccccatgtccaccatgac

SEQ ID NO: 19899 - DNA, 20 bp, synthetic construct
  misc_feature 1..20: note = Artificial sequence related to HLA knockouts in cell therapy
  source 1..20: mol_type = other DNA
cccccatgtccaccatgacc

SEQ ID NO: 19900 - DNA, 20 bp, synthetic construct
  misc_feature 1..20: note = Artificial sequence related to HLA knockouts in cell therapy
  source 1..20: mol_type = other DNA
ccccatgtccaccatgaccc

SEQ ID NO: 19901 - DNA, 20 bp, synthetic construct
  misc_feature 1..20: note = Artificial sequence related to HLA knockouts in cell therapy
  source 1..20: mol_type = other DNA
cccatgtccaccatgaccct

SEQ ID NO: 19902 - DNA, 20 bp, synthetic construct
  misc_feature 1..20: note = Artificial sequence related to HLA knockouts in cell therapy
  source 1..20: mol_type = other DNA
ccatgtccaccatgaccctc

SEQ ID NO: 19903 - DNA, 20 bp, synthetic construct
  misc_feature 1..20: note = Artificial sequence related to HLA knockouts in cell therapy
  source 1..20: mol_type = other DNA
gtccaccatgaccctcttcc

SEQ ID NO: 19904 - DNA, 20 bp, synthetic construct
  misc_feature 1..20: note = Artificial sequence related to HLA knockouts in cell therapy
  source 1..20: mol_type = other DNA
tccaccatgaccctcttccc

SEQ ID NO: 19905 - DNA, 20 bp, synthetic construct
  misc_feature 1..20: note = Artificial sequence related to HLA knockouts in cell therapy
  source 1..20: mol_type = other DNA
ccaccatgaccctcttccca

SEQ ID NO: 19906 - DNA, 20 bp, synthetic construct
  misc_feature 1..20: note = Artificial sequence related to HLA knockouts in cell therapy
  source 1..20: mol_type = other DNA
caccatgaccctcttcccac

SEQ ID NO: 19907 - DNA, 20 bp, synthetic construct
  misc_feature 1..20: note = Artificial sequence related to HLA knockouts in cell therapy
  source 1..20: mol_type = other DNA
accatgaccctcttcccacg

SEQ ID NO: 19908 - DNA, 20 bp, synthetic construct
  misc_feature 1..20: note = Artificial sequence related to HLA knockouts in cell therapy
  source 1..20: mol_type = other DNA
ccatgaccctcttcccacgc

SEQ ID NO: 19909 - DNA, 20 bp, synthetic construct
  misc_feature 1..20: note = Artificial sequence related to HLA knockouts in cell therapy
  source 1..20: mol_type = other DNA
catgaccctcttcccacgct

SEQ ID NO: 19910 - DNA, 20 bp, synthetic construct
  misc_feature 1..20: note = Artificial sequence related to HLA knockouts in cell therapy
  source 1..20: mol_type = other DNA
atgaccctcttcccacgctg

SEQ ID NO: 19911 - DNA, 20 bp, synthetic construct
  misc_feature 1..20: note = Artificial sequence related to HLA knockouts in cell therapy
  source 1..20: mol_type = other DNA
tgaccctcttcccacgctga

SEQ ID NO: 19912 - DNA, 20 bp, synthetic construct
  misc_feature 1..20: note = Artificial sequence related to HLA knockouts in cell therapy
  source 1..20: mol_type = other DNA
gaccctcttcccacgctgac

SEQ ID NO: 19913 - DNA, 20 bp, synthetic construct
  misc_feature 1..20: note = Artificial sequence related to HLA knockouts in cell therapy
  source 1..20: mol_type = other DNA
accctcttcccacgctgacc

SEQ ID NO: 19914 - DNA, 20 bp, synthetic construct
  misc_feature 1..20: note = Artificial sequence related to HLA knockouts in cell therapy
  source 1..20: mol_type = other DNA
ccctcttcccacgctgacct

SEQ ID NO: 19915 - DNA, 20 bp, synthetic construct
  misc_feature 1..20: note = Artificial sequence related to HLA knockouts in cell therapy
  source 1..20: mol_type = other DNA
cctcttcccacgctgacctg

SEQ ID NO: 19916 - DNA, 20 bp, synthetic construct
  misc_feature 1..20: note = Artificial sequence related to HLA knockouts in cell therapy
  source 1..20: mol_type = other DNA
ctcttcccacgctgacctgt

SEQ ID NO: 19917 - DNA, 20 bp, synthetic construct
  misc_feature 1..20: note = Artificial sequence related to HLA knockouts in cell therapy
  source 1..20: mol_type = other DNA
tcttcccacgctgacctgtg

SEQ ID NO: 19918 - DNA, 20 bp, synthetic construct
  misc_feature 1..20: note = Artificial sequence related to HLA knockouts in cell therapy
  source 1..20: mol_type = other DNA
cttcccacgctgacctgtgc

SEQ ID NO: 19919 - DNA, 20 bp, synthetic construct
  misc_feature 1..20: note = Artificial sequence related to HLA knockouts in cell therapy
  source 1..20: mol_type = other DNA
ttcccacgctgacctgtgct

SEQ ID NO: 19920 - DNA, 20 bp, synthetic construct
  misc_feature 1..20: note = Artificial sequence related to HLA knockouts in cell therapy
  source 1..20: mol_type = other DNA
tcccacgctgacctgtgctc

SEQ ID NO: 19921 - DNA, 20 bp, synthetic construct
  misc_feature 1..20: note = Artificial sequence related to HLA knockouts in cell therapy
  source 1..20: mol_type = other DNA
cccacgctgacctgtgctcc

SEQ ID NO: 19922 - DNA, 20 bp, synthetic construct
  misc_feature 1..20: note = Artificial sequence related to HLA knockouts in cell therapy
  source 1..20: mol_type = other DNA
ccacgctgacctgtgctccc

SEQ ID NO: 19923 - DNA, 20 bp, synthetic construct
  misc_feature 1..20: note = Artificial sequence related to HLA knockouts in cell therapy
  source 1..20: mol_type = other DNA
cacgctgacctgtgctccct

SEQ ID NO: 19924 - DNA, 20 bp, synthetic construct
  misc_feature 1..20: note = Artificial sequence related to HLA knockouts in cell therapy
  source 1..20: mol_type = other DNA
acgctgacctgtgctccctc

SEQ ID NO: 19925 - DNA, 20 bp, synthetic construct
  misc_feature 1..20: note = Artificial sequence related to HLA knockouts in cell therapy
  source 1..20: mol_type = other DNA
cgctgacctgtgctccctcc

SEQ ID NO: 19926 - DNA, 20 bp, synthetic construct
  misc_feature 1..20: note = Artificial sequence related to HLA knockouts in cell therapy
  source 1..20: mol_type = other DNA
gctgacctgtgctccctccc

SEQ ID NO: 19927 - DNA, 20 bp, synthetic construct
  misc_feature 1..20: note = Artificial sequence related to HLA knockouts in cell therapy
  source 1..20: mol_type = other DNA
ctgacctgtgctccctcccc

SEQ ID NO: 19928 - DNA, 20 bp, synthetic construct
  misc_feature 1..20: note = Artificial sequence related to HLA knockouts in cell therapy
  source 1..20: mol_type = other DNA
tgacctgtgctccctcccca

SEQ ID NO: 19929 - DNA, 20 bp, synthetic construct
  misc_feature 1..20: note = Artificial sequence related to HLA knockouts in cell therapy
  source 1..20: mol_type = other DNA
gacctgtgctccctccccaa

SEQ ID NO: 19930 - DNA, 20 bp, synthetic construct
  misc_feature 1..20: note = Artificial sequence related to HLA knockouts in cell therapy
  source 1..20: mol_type = other DNA
acctgtgctccctccccaat

SEQ ID NO: 19931 - DNA, 20 bp, synthetic construct
  misc_feature 1..20: note = Artificial sequence related to HLA knockouts in cell therapy
  source 1..20: mol_type = other DNA
cctgtgctccctccccaatc

SEQ ID NO: 19932 - DNA, 20 bp, synthetic construct
  misc_feature 1..20: note = Artificial sequence related to HLA knockouts in cell therapy
  source 1..20: mol_type = other DNA
ctgtgctccctccccaatca

SEQ ID NO: 19933 - DNA, 20 bp, synthetic construct
  misc_feature 1..20: note = Artificial sequence related to HLA knockouts in cell therapy
  source 1..20: mol_type = other DNA
gtgctccctccccaatcatc

SEQ ID NO: 19934 - DNA, 20 bp, synthetic construct
  misc_feature 1..20: note = Artificial sequence related to HLA knockouts in cell therapy
  source 1..20: mol_type = other DNA
tcctgttccagagaggtggg

SEQ ID NO: 19935 - DNA, 20 bp, synthetic construct
  misc_feature 1..20: note = Artificial sequence related to HLA knockouts in cell therapy
  source 1..20: mol_type = other DNA
cctgttccagagaggtgggg

SEQ ID NO: 19936 - DNA, 20 bp, synthetic construct
  misc_feature 1..20: note = Artificial sequence related to HLA knockouts in cell therapy
  source 1..20: mol_type = other DNA
ctgttccagagaggtggggc

SEQ ID NO: 19937 - DNA, 20 bp, synthetic construct
  misc_feature 1..20: note = Artificial sequence related to HLA knockouts in cell therapy
  source 1..20: mol_type = other DNA
tgttccagagaggtggggct

SEQ ID NO: 19938 - DNA, 20 bp, synthetic construct
  misc_feature 1..20: note = Artificial sequence related to HLA knockouts in cell therapy
  source 1..20: mol_type = other DNA
gttccagagaggtggggctg

SEQ ID NO: 19939 - DNA, 20 bp, synthetic construct
  misc_feature 1..20: note = Artificial sequence related to HLA knockouts in cell therapy
  source 1..20: mol_type = other DNA
ttccagagaggtggggctga

SEQ ID NO: 19940 - DNA, 20 bp, synthetic construct
  misc_feature 1..20: note = Artificial sequence related to HLA knockouts in cell therapy
  source 1..20: mol_type = other DNA
tccagagaggtggggctgag

SEQ ID NO: 19941 - DNA, 20 bp, synthetic construct
  misc_feature 1..20: note = Artificial sequence related to HLA knockouts in cell therapy
  source 1..20: mol_type = other DNA
ccagagaggtggggctgagg

SEQ ID NO: 19942 - DNA, 20 bp, synthetic construct
  misc_feature 1..20: note = Artificial sequence related to HLA knockouts in cell therapy
  source 1..20: mol_type = other DNA
cagagaggtggggctgaggt

SEQ ID NO: 19943 - DNA, 20 bp, synthetic construct
  misc_feature 1..20: note = Artificial sequence related to HLA knockouts in cell therapy
  source 1..20: mol_type = other DNA
agagaggtggggctgaggtg

SEQ ID NO: 19944 - DNA, 20 bp, synthetic construct
  misc_feature 1..20: note = Artificial sequence related to HLA knockouts in cell therapy
  source 1..20: mol_type = other DNA
gagaggtggggctgaggtgt

SEQ ID NO: 19945 - DNA, 20 bp, synthetic construct
  misc_feature 1..20: note = Artificial sequence related to HLA knockouts in cell therapy
  source 1..20: mol_type = other DNA
agaggtggggctgaggtgtc

SEQ ID NO: 19946 - DNA, 20 bp, synthetic construct
  misc_feature 1..20: note = Artificial sequence related to HLA knockouts in cell therapy
  source 1..20: mol_type = other DNA
gaggtggggctgaggtgtct

SEQ ID NO: 19947 - DNA, 20 bp, synthetic construct
  misc_feature 1..20: note = Artificial sequence related to HLA knockouts in cell therapy
  source 1..20: mol_type = other DNA
aggtggggctgaggtgtctc

SEQ ID NO: 19948 - DNA, 20 bp, synthetic construct
  misc_feature 1..20: note = Artificial sequence related to HLA knockouts in cell therapy
  source 1..20: mol_type = other DNA
ggtggggctgaggtgtctcc

SEQ ID NO: 19949 - DNA, 20 bp, synthetic construct
  misc_feature 1..20: note = Artificial sequence related to HLA knockouts in cell therapy
  source 1..20: mol_type = other DNA
gtggggctgaggtgtctcca

SEQ ID NO: 19950 - DNA, 20 bp, synthetic construct
  misc_feature 1..20: note = Artificial sequence related to HLA knockouts in cell therapy
  source 1..20: mol_type = other DNA
tggggctgaggtgtctccat

SEQ ID NO: 19951 - DNA, 20 bp, synthetic construct
  misc_feature 1..20: note = Artificial sequence related to HLA knockouts in cell therapy
  source 1..20: mol_type = other DNA
ggggctgaggtgtctccatc

SEQ ID NO: 19952 - DNA, 20 bp, synthetic construct
  misc_feature 1..20: note = Artificial sequence related to HLA knockouts in cell therapy
  source 1..20: mol_type = other DNA
gggctgaggtgtctccatct

SEQ ID NO: 19953 - DNA, 20 bp, synthetic construct
  misc_feature 1..20: note = Artificial sequence related to HLA knockouts in cell therapy
  source 1..20: mol_type = other DNA
ggctgaggtgtctccatctc

SEQ ID NO: 19954 - DNA, 21 bp, synthetic construct
  misc_feature 1..21: note = Artificial sequence related to HLA knockouts in cell therapy
  source 1..21: mol_type = other DNA
cagaagcagaggggtcagggc

SEQ ID NO: 19955 - DNA, 21 bp, synthetic construct
  misc_feature 1..21: note = Artificial sequence related to HLA knockouts in cell therapy
  source 1..21: mol_type = other DNA
agaagcagaggggtcagggcg

SEQ ID NO: 19956 - DNA, 21 bp, synthetic construct
  misc_feature 1..21: note = Artificial sequence related to HLA knockouts in cell therapy
  source 1..21: mol_type = other DNA
gaagcagaggggtcagggcga

SEQ ID NO: 19957 - DNA, 21 bp, synthetic construct
  misc_feature 1..21: note = Artificial sequence related to HLA knockouts in cell therapy
  source 1..21: mol_type = other DNA
aagcagaggggtcagggcgaa

SEQ ID NO: 19958 - DNA, 21 bp, synthetic construct
  misc_feature 1..21: note = Artificial sequence related to HLA knockouts in cell therapy
  source 1..21: mol_type = other DNA
agcagaggggtcagggcgaag

SEQ ID NO: 19959 - DNA, 21 bp, synthetic construct
  misc_feature 1..21: note = Artificial sequence related to HLA knockouts in cell therapy
  source 1..21: mol_type = other DNA
gcagaggggtcagggcgaagt

SEQ ID NO: 19960 - DNA, 21 bp, synthetic construct
  misc_feature 1..21: note = Artificial sequence related to HLA knockouts in cell therapy
  source 1..21: mol_type = other DNA
cagaggggtcagggcgaagtc

SEQ ID NO: 19961 - DNA, 21 bp, synthetic construct
  misc_feature 1..21: note = Artificial sequence related to HLA knockouts in cell therapy
  source 1..21: mol_type = other DNA
agaggggtcagggcgaagtcc

SEQ ID NO: 19962 - DNA, 21 bp, synthetic construct
  misc_feature 1..21: note = Artificial sequence related to HLA knockouts in cell therapy
  source 1..21: mol_type = other DNA
gaggggtcagggcgaagtccc

SEQ ID NO: 19963 - DNA, 21 bp, synthetic construct
  misc_feature 1..21: note = Artificial sequence related to HLA knockouts in cell therapy
  source 1..21: mol_type = other DNA
aggggtcagggcgaagtccca

SEQ ID NO: 19964 - DNA, 21 bp, synthetic construct
  misc_feature 1..21: note = Artificial sequence related to HLA knockouts in cell therapy
  source 1..21: mol_type = other DNA
ggggtcagggcgaagtcccag

SEQ ID NO: 19965 - DNA, 21 bp, synthetic construct
  misc_feature 1..21: note = Artificial sequence related to HLA knockouts in cell therapy
  source 1..21: mol_type = other DNA
gggtcagggcgaagtcccagg

SEQ ID NO: 19966 - DNA, 21 bp, synthetic construct
  misc_feature 1..21: note = Artificial sequence related to HLA knockouts in cell therapy
  source 1..21: mol_type = other DNA
ggtcagggcgaagtcccaggg

SEQ ID NO: 19967 - DNA, 21 bp, synthetic construct
  misc_feature 1..21: note = Artificial sequence related to HLA knockouts in cell therapy
  source 1..21: mol_type = other DNA
gtcagggcgaagtcccagggc

SEQ ID NO: 19968 - DNA, 21 bp, synthetic construct
  misc_feature 1..21: note = Artificial sequence related to HLA knockouts in cell therapy
  source 1..21: mol_type = other DNA
tcagggcgaagtcccagggcc

SEQ ID NO: 19969 - DNA, 21 bp, synthetic construct
  misc_feature 1..21: note = Artificial sequence related to HLA knockouts in cell therapy
  source 1..21: mol_type = other DNA
cagggcgaagtcccagggccc

SEQ ID NO: 19970 - DNA, 21 bp, synthetic construct
  misc_feature 1..21: note = Artificial sequence related to HLA knockouts in cell therapy
  source 1..21: mol_type = other DNA
agggcgaagtcccagggcccc

SEQ ID NO: 19971 - DNA, 21 bp, synthetic construct
  misc_feature 1..21: note = Artificial sequence related to HLA knockouts in cell therapy
  source 1..21: mol_type = other DNA
gggcgaagtcccagggcccca

SEQ ID NO: 19972 - DNA, 21 bp, synthetic construct
  misc_feature 1..21: note = Artificial sequence related to HLA knockouts in cell therapy
  source 1..21: mol_type = other DNA
ggcgaagtcccagggccccag

SEQ ID NO: 19973 - DNA, 21 bp, synthetic construct
  misc_feature 1..21: note = Artificial sequence related to HLA knockouts in cell therapy
  source 1..21: mol_type = other DNA
gcgaagtcccagggccccagg

SEQ ID NO: 19974 - DNA, 21 bp, synthetic construct
  misc_feature 1..21: note = Artificial sequence related to HLA knockouts in cell therapy
  source 1..21: mol_type = other DNA
cgaagtcccagggccccaggc

SEQ ID NO: 19975 - DNA, 21 bp, synthetic construct
  misc_feature 1..21: note = Artificial sequence related to HLA knockouts in cell therapy
  source 1..21: mol_type = other DNA
gaagtcccagggccccaggcg

SEQ ID NO: 19976 - DNA, 21 bp, synthetic construct
  misc_feature 1..21: note = Artificial sequence related to HLA knockouts in cell therapy
  source 1..21: mol_type = other DNA
aagtcccagggccccaggcgt

SEQ ID NO: 19977 - DNA, 21 bp, synthetic construct
  misc_feature 1..21: note = Artificial sequence related to HLA knockouts in cell therapy
  source 1..21: mol_type = other DNA
agtcccagggccccaggcgtg

SEQ ID NO: 19978 - DNA, 21 bp, synthetic construct
  misc_feature 1..21: note = Artificial sequence related to HLA knockouts in cell therapy
  source 1..21: mol_type = other DNA
gtcccagggccccaggcgtgg

SEQ ID NO: 19979 - DNA, 21 bp, synthetic construct
  misc_feature 1..21: note = Artificial sequence related to HLA knockouts in cell therapy
  source 1..21: mol_type = other DNA
tcccagggccccaggcgtggc

SEQ ID NO: 19980 - DNA, 21 bp, synthetic construct
  misc_feature 1..21: note = Artificial sequence related to HLA knockouts in cell therapy
  source 1..21: mol_type = other DNA
cccagggccccaggcgtggct

SEQ ID NO: 19981 - DNA, 21 bp, synthetic construct
  misc_feature 1..21: note = Artificial sequence related to HLA knockouts in cell therapy
  source 1..21: mol_type = other DNA
ccagggccccaggcgtggctc

SEQ ID NO: 19982 - DNA, 21 bp, synthetic construct
  misc_feature 1..21: note = Artificial sequence related to HLA knockouts in cell therapy
  source 1..21: mol_type = other DNA
cagggccccaggcgtggctct

SEQ ID NO: 19983 - DNA, 21 bp, synthetic construct
  misc_feature 1..21: note = Artificial sequence related to HLA knockouts in cell therapy
  source 1..21: mol_type = other DNA
agggccccaggcgtggctctc

SEQ ID NO: 19984 - DNA, 21 bp, synthetic construct
  misc_feature 1..21: note = Artificial sequence related to HLA knockouts in cell therapy
  source 1..21: mol_type = other DNA
gggccccaggcgtggctctca

SEQ ID NO: 19985 - DNA, 21 bp, synthetic construct
  misc_feature 1..21: note = Artificial sequence related to HLA knockouts in cell therapy
  source 1..21: mol_type = other DNA
ggccccaggcgtggctctcag

SEQ ID NO: 19986 - DNA, 21 bp, synthetic construct
  misc_feature 1..21: note = Artificial sequence related to HLA knockouts in cell therapy
  source 1..21: mol_type = other DNA
gccccaggcgtggctctcagg

SEQ ID NO: 19987 - DNA, 21 bp, synthetic construct
  misc_feature 1..21: note = Artificial sequence related to HLA knockouts in cell therapy
  source 1..21: mol_type = other DNA
ccccaggcgtggctctcaggg

SEQ ID NO: 19988 - DNA, 21 bp, synthetic construct
  misc_feature 1..21: note = Artificial sequence related to HLA knockouts in cell therapy
  source 1..21: mol_type = other DNA
cccaggcgtggctctcagggt

SEQ ID NO: 19989 - DNA, 21 bp, synthetic construct
  misc_feature 1..21: note = Artificial sequence related to HLA knockouts in cell therapy
  source 1..21: mol_type = other DNA
ccaggcgtggctctcagggtc

SEQ ID NO: 19990 - DNA, 21 bp, synthetic construct
  misc_feature 1..21: note = Artificial sequence related to HLA knockouts in cell therapy
  source 1..21: mol_type = other DNA
caggcgtggctctcagggtct

SEQ ID NO: 19991 - DNA, 21 bp, synthetic construct
  misc_feature 1..21: note = Artificial sequence related to HLA knockouts in cell therapy
  source 1..21: mol_type = other DNA
aggcgtggctctcagggtctc

SEQ ID NO: 19992 - DNA, 21 bp, synthetic construct
  misc_feature 1..21: note = Artificial sequence related to HLA knockouts in cell therapy
  source 1..21: mol_type = other DNA
ggcgtggctctcagggtctca

SEQ ID NO: 19993 - DNA, 21 bp, synthetic construct
  misc_feature 1..21: note = Artificial sequence related to HLA knockouts in cell therapy
  source 1..21: mol_type = other DNA
gcgtggctctcagggtctcag

SEQ ID NO: 19994 - DNA, 21 bp, synthetic construct
  misc_feature 1..21: note = Artificial sequence related to HLA knockouts in cell therapy
  source 1..21: mol_type = other DNA
cgtggctctcagggtctcagg

SEQ ID NO: 19995 - DNA, 21 bp, synthetic construct
  misc_feature 1..21: note = Artificial sequence related to HLA knockouts in cell therapy
  source 1..21: mol_type = other DNA
gtggctctcagggtctcaggc

SEQ ID NO: 19996 - DNA, 21 bp, synthetic construct
  misc_feature 1..21: note = Artificial sequence related to HLA knockouts in cell therapy
  source 1..21: mol_type = other DNA
tggctctcagggtctcaggcc

SEQ ID NO: 19997 - DNA, 21 bp, synthetic construct
  misc_feature 1..21: note = Artificial sequence related to HLA knockouts in cell therapy
  source 1..21: mol_type = other DNA
ggctctcagggtctcaggccc

SEQ ID NO: 19998 - DNA, 21 bp, synthetic construct
  misc_feature 1..21: note = Artificial sequence related to HLA knockouts in cell therapy
  source 1..21: mol_type = other DNA
gctctcagggtctcaggcccc

SEQ ID NO: 19999 - DNA, 21 bp, synthetic construct
  misc_feature 1..21: note = Artificial sequence related to HLA knockouts in cell therapy
  source 1..21: mol_type = other DNA
ctctcagggtctcaggccccg

SEQ ID NO: 20000 - DNA, 21 bp, synthetic construct
  misc_feature 1..21: note = Artificial sequence related to HLA knockouts in cell therapy
  source 1..21: mol_type = other DNA
tctcagggtctcaggccccga

SEQ ID NO: 20001 - DNA, 21 bp, synthetic construct
  misc_feature 1..21: note = Artificial sequence related to HLA knockouts in cell therapy
  source 1..21: mol_type = other DNA
ctcagggtctcaggccccgaa

SEQ ID NO: 20002 - DNA, 21 bp, synthetic construct
  misc_feature 1..21: note = Artificial sequence related to HLA knockouts in cell therapy
  source 1..21: mol_type = other DNA
tcagggtctcaggccccgaag

SEQ ID NO: 20003 - DNA, 21 bp, synthetic construct
  misc_feature 1..21: note = Artificial sequence related to HLA knockouts in cell therapy
  source 1..21: mol_type = other DNA
cagggtctcaggccccgaagg

SEQ ID NO: 20004 - DNA, 21 bp, synthetic construct
  misc_feature 1..21: note = Artificial sequence related to HLA knockouts in cell therapy
  source 1..21: mol_type = other DNA
agggtctcaggccccgaaggc

SEQ ID NO: 20005 - DNA, 21 bp, synthetic construct
  misc_feature 1..21: note = Artificial sequence related to HLA knockouts in cell therapy
  source 1..21: mol_type = other DNA
gggtctcaggccccgaaggcg

SEQ ID NO: 20006 - DNA, 21 bp, synthetic construct
  misc_feature 1..21: note = Artificial sequence related to HLA knockouts in cell therapy
  source 1..21: mol_type = other DNA
ggtctcaggccccgaaggcgg

SEQ ID NO: 20007 - DNA, 21 bp, synthetic construct
  misc_feature 1..21: note = Artificial sequence related to HLA knockouts in cell therapy
  source 1..21: mol_type = other DNA
gtctcaggccccgaaggcggt

SEQ ID NO: 20008 - DNA, 21 bp, synthetic construct
  misc_feature 1..21: note = Artificial sequence related to HLA knockouts in cell therapy
  source 1..21: mol_type = other DNA
tctcaggccccgaaggcggtg

SEQ ID NO: 20009 - DNA, 21 bp, synthetic construct
  misc_feature 1..21: note = Artificial sequence related to HLA knockouts in cell therapy
  source 1..21: mol_type = other DNA
ctcaggccccgaaggcggtgt

SEQ ID NO: 20010 - DNA, 21 bp, synthetic construct
  misc_feature 1..21: note = Artificial sequence related to HLA knockouts in cell therapy
  source 1..21: mol_type = other DNA
tcaggccccgaaggcggtgta

SEQ ID NO: 20011 - DNA, 21 bp, synthetic construct
  misc_feature 1..21: note = Artificial sequence related to HLA knockouts in cell therapy
  source 1..21: mol_type = other DNA
caggccccgaaggcggtgtat

SEQ ID NO: 20012 - DNA, 21 bp, synthetic construct
  misc_feature 1..21: note = Artificial sequence related to HLA knockouts in cell therapy
  source 1..21: mol_type = other DNA
aggccccgaaggcggtgtatg

SEQ ID NO: 20013 - DNA, 21 bp, synthetic construct
  misc_feature 1..21: note = Artificial sequence related to HLA knockouts in cell therapy
  source 1..21: mol_type = other DNA
ggccccgaaggcggtgtatgg

SEQ ID NO: 20014 - DNA, 21 bp, synthetic construct
  misc_feature 1..21: note = Artificial sequence related to HLA knockouts in cell therapy
  source 1..21: mol_type = other DNA
gccccgaaggcggtgtatgga

SEQ ID NO: 20015 - DNA, 21 bp, synthetic construct
  misc_feature 1..21: note = Artificial sequence related to HLA knockouts in cell therapy
  source 1..21: mol_type = other DNA
ccccgaaggcggtgtatggat

SEQ ID NO: 20016 - DNA, 21 bp, synthetic construct
  misc_feature 1..21: note = Artificial sequence related to HLA knockouts in cell therapy
  source 1..21: mol_type = other DNA
ggcggtgtatggattggggag

SEQ ID NO: 20017 - DNA, 21 bp, synthetic construct
  misc_feature 1..21: note = Artificial sequence related to HLA knockouts in cell therapy
  source 1..21: mol_type = other DNA
atggattggggagtcccagcc

SEQ ID NO: 20018 - DNA, 21 bp, synthetic construct
  misc_feature 1..21: note = Artificial sequence related to HLA knockouts in cell therapy
  source 1..21: mol_type = other DNA
tggattggggagtcccagcct

SEQ ID NO: 20019 - DNA, 21 bp, synthetic construct
  misc_feature 1..21: note = Artificial sequence related to HLA knockouts in cell therapy
  source 1..21: mol_type = other DNA
ggattggggagtcccagcctt

SEQ ID NO: 20020 - DNA, 21 bp, synthetic construct
  misc_feature 1..21: note = Artificial sequence related to HLA knockouts in cell therapy
  source 1..21: mol_type = other DNA
gattggggagtcccagccttg

SEQ ID NO: 20021 - DNA, 21 bp, synthetic construct
  misc_feature 1..21: note = Artificial sequence related to HLA knockouts in cell therapy
  source 1..21: mol_type = other DNA
attggggagtcccagccttgg

SEQ ID NO: 20022 - DNA, 21 bp, synthetic construct
  misc_feature 1..21: note = Artificial sequence related to HLA knockouts in cell therapy
  source 1..21: mol_type = other DNA
ttggggagtcccagccttggg

SEQ ID NO: 20023 - DNA, 21 bp, synthetic construct
  misc_feature 1..21: note = Artificial sequence related to HLA knockouts in cell therapy
  source 1..21: mol_type = other DNA
tggggagtcccagccttgggg

SEQ ID NO: 20024 - DNA, 21 bp, synthetic construct
  misc_feature 1..21: note = Artificial sequence related to HLA knockouts in cell therapy
  source 1..21: mol_type = other DNA
ggggagtcccagccttgggga

SEQ ID NO: 20025 - DNA, 21 bp, synthetic construct
  misc_feature 1..21: note = Artificial sequence related to HLA knockouts in cell therapy
  source 1..21: mol_type = other DNA
gggagtcccagccttggggat

SEQ ID NO: 20026 - DNA, 21 bp, synthetic construct
  misc_feature 1..21: note = Artificial sequence related to HLA knockouts in cell therapy
  source 1..21: mol_type = other DNA
ggagtcccagccttggggatt

SEQ ID NO: 20027 - DNA, 21 bp, synthetic construct
  misc_feature 1..21: note = Artificial sequence related to HLA knockouts in cell therapy
  source 1..21: mol_type = other DNA
gagtcccagccttggggattc

SEQ ID NO: 20028 - DNA, 21 bp, synthetic construct
  misc_feature 1..21: note = Artificial sequence related to HLA knockouts in cell therapy
  source 1..21: mol_type = other DNA
agtcccagccttggggattcc

SEQ ID NO: 20029 - DNA, 21 bp, synthetic construct
  misc_feature 1..21: note = Artificial sequence related to HLA knockouts in cell therapy
  source 1..21: mol_type = other DNA
gtcccagccttggggattccc

SEQ ID NO: 20030 - DNA, 21 bp, synthetic construct
  misc_feature 1..21: note = Artificial sequence related to HLA knockouts in cell therapy
  source 1..21: mol_type = other DNA
tcccagccttggggattcccc

SEQ ID NO: 20031 - DNA, 21 bp, synthetic construct
  misc_feature 1..21: note = Artificial sequence related to HLA knockouts in cell therapy
  source 1..21: mol_type = other DNA
cccagccttggggattcccca

SEQ ID NO: 20032 - DNA, 21 bp, synthetic construct
  misc_feature 1..21: note = Artificial sequence related to HLA knockouts in cell therapy
  source 1..21: mol_type = other DNA
ccagccttggggattccccaa

SEQ ID NO: 20033 - DNA, 21 bp, synthetic construct
  misc_feature 1..21: note = Artificial sequence related to HLA knockouts in cell therapy
  source 1..21: mol_type = other DNA
cagccttggggattccccaac

SEQ ID NO: 20034 - DNA, 21 bp, synthetic construct
  misc_feature 1..21: note = Artificial sequence related to HLA knockouts in cell therapy
  source 1..21: mol_type = other DNA
gccttggggattccccaactc

SEQ ID NO: 20035 - DNA, 21 bp, synthetic construct
  misc_feature 1..21: note = Artificial sequence related to HLA knockouts in cell therapy
  source 1..21: mol_type = other DNA
ccttggggattccccaactcc

SEQ ID NO: 20036 - DNA, 21 bp, synthetic construct
  misc_feature 1..21: note = Artificial sequence related to HLA knockouts in cell therapy
  source 1..21: mol_type = other DNA
cttggggattccccaactccg

SEQ ID NO: 20037 - DNA, 21 bp, synthetic construct
  misc_feature 1..21: note = Artificial sequence related to HLA knockouts in cell therapy
  source 1..21: mol_type = other DNA
ttggggattccccaactccgc

SEQ ID NO: 20038 - DNA, 21 bp, synthetic construct
  misc_feature 1..21: note = Artificial sequence related to HLA knockouts in cell therapy
  source 1..21: mol_type = other DNA
tggggattccccaactccgca

SEQ ID NO: 20039 - DNA, 21 bp, synthetic construct
  misc_feature 1..21: note = Artificial sequence related to HLA knockouts in cell therapy
  source 1..21: mol_type = other DNA
ggggattccccaactccgcag

SEQ ID NO: 20040 - DNA, 21 bp, synthetic construct
  misc_feature 1..21: note = Artificial sequence related to HLA knockouts in cell therapy
  source 1..21: mol_type = other DNA
gggattccccaactccgcagt

SEQ ID NO: 20041 - DNA, 21 bp, synthetic construct
  misc_feature 1..21: note = Artificial sequence related to HLA knockouts in cell therapy
  source 1..21: mol_type = other DNA
tcctggatactcacgacgcgg

SEQ ID NO: 20042 - DNA, 21 bp, synthetic construct
  misc_feature 1..21: note = Artificial sequence related to HLA knockouts in cell therapy
  source 1..21: mol_type = other DNA
cctggatactcacgacgcgga

SEQ ID NO: 20043 - DNA, 21 bp, synthetic construct
  misc_feature 1..21: note = Artificial sequence related to HLA knockouts in cell therapy
  source 1..21: mol_type = other DNA
ctggatactcacgacgcggac

SEQ ID NO: 20044 - DNA, 21 bp, synthetic construct
  misc_feature 1..21: note = Artificial sequence related to HLA knockouts in cell therapy
  source 1..21: mol_type = other DNA
tggatactcacgacgcggacc

SEQ ID NO: 20045 - DNA, 21 bp, synthetic construct
  misc_feature 1..21: note = Artificial sequence related to HLA knockouts in cell therapy
  source 1..21: mol_type = other DNA
ggatactcacgacgcggaccc

SEQ ID NO: 20046 - DNA, 21 bp, synthetic construct
  misc_feature 1..21: note = Artificial sequence related to HLA knockouts in cell therapy
  source 1..21: mol_type = other DNA
gatactcacgacgcggaccca

SEQ ID NO: 20047 - DNA, 21 bp, synthetic construct
  misc_feature 1..21: note = Artificial sequence related to HLA knockouts in cell therapy
  source 1..21: mol_type = other DNA
atactcacgacgcggacccag

SEQ ID NO: 20048 - DNA, 21 bp, synthetic construct
  misc_feature 1..21: note = Artificial sequence related to HLA knockouts in cell therapy
  source 1..21: mol_type = other DNA
tactcacgacgcggacccagt

SEQ ID NO: 20049 - DNA, 21 bp, synthetic construct
  misc_feature 1..21: note = Artificial sequence related to HLA knockouts in cell therapy
  source 1..21: mol_type = other DNA
actcacgacgcggacccagtt

SEQ ID NO: 20050 - DNA, 21 bp, synthetic construct
  misc_feature 1..21: note = Artificial sequence related to HLA knockouts in cell therapy
  source 1..21: mol_type = other DNA
ctcacgacgcggacccagttc

SEQ ID NO: 20051 - DNA, 21 bp, synthetic construct
  misc_feature 1..21: note = Artificial sequence related to HLA knockouts in cell therapy
  source 1..21: mol_type = other DNA
tcacgacgcggacccagttct

SEQ ID NO: 20052 - DNA, 21 bp, synthetic construct
  misc_feature 1..21: note = Artificial sequence related to HLA knockouts in cell therapy
  source 1..21: mol_type = other DNA
cacgacgcggacccagttctc

SEQ ID NO: 20053 - DNA, 21 bp, synthetic construct
  misc_feature 1..21: note = Artificial sequence related to HLA knockouts in cell therapy
  source 1..21: mol_type = other DNA
acgacgcggacccagttctca

SEQ ID NO: 20054 - DNA, 21 bp, synthetic construct
  misc_feature 1..21: note = Artificial sequence related to HLA knockouts in cell therapy
  source 1..21: mol_type = other DNA
cgacgcggacccagttctcac

SEQ ID NO: 20055 - DNA, 21 bp, synthetic construct
  misc_feature 1..21: note = Artificial sequence related to HLA knockouts in cell therapy
  source 1..21: mol_type = other DNA
gacgcggacccagttctcact

SEQ ID NO: 20056 - DNA, 21 bp, synthetic construct
  misc_feature 1..21: note = Artificial sequence related to HLA knockouts in cell therapy
  source 1..21: mol_type = other DNA
acgcggacccagttctcactc

SEQ ID NO: 20057 - DNA, 21 bp, synthetic construct
  misc_feature 1..21: note = Artificial sequence related to HLA knockouts in cell therapy
  source 1..21: mol_type = other DNA
cgcggacccagttctcactcc

SEQ ID NO: 20058 - DNA, 21 bp, synthetic construct
  misc_feature 1..21: note = Artificial sequence related to HLA knockouts in cell therapy
  source 1..21: mol_type = other DNA
gcggacccagttctcactccc

SEQ ID NO: 20059 - DNA, 21 bp, synthetic construct
  misc_feature 1..21: note = Artificial sequence related to HLA knockouts in cell therapy
  source 1..21: mol_type = other DNA
cggacccagttctcactccca

SEQ ID NO: 20060 - DNA, 21 bp, synthetic construct
  misc_feature 1..21: note = Artificial sequence related to HLA knockouts in cell therapy
  source 1..21: mol_type = other DNA
ctcactcccattgggtgtcgg

SEQ ID NO: 20061 - DNA, 21 bp, synthetic construct
  misc_feature 1..21: note = Artificial sequence related to HLA knockouts in cell therapy
  source 1..21: mol_type = other DNA
tcactcccattgggtgtcggg

SEQ ID NO: 20062 - DNA, 21 bp, synthetic construct
  misc_feature 1..21: note = Artificial sequence related to HLA knockouts in cell therapy
  source 1..21: mol_type = other DNA
cactcccattgggtgtcgggt

SEQ ID NO: 20063 - DNA, 21 bp, synthetic construct
  misc_feature 1..21: note = Artificial sequence related to HLA knockouts in cell therapy
  source 1..21: mol_type = other DNA
cccattgggtgtcgggtttcc

SEQ ID NO: 20064 - DNA, 21 bp, synthetic construct
  misc_feature 1..21: note = Artificial sequence related to HLA knockouts in cell therapy
  source 1..21: mol_type = other DNA
agccaatcagtgtcgtcgcgg

SEQ ID NO: 20065 - DNA, 21 bp, synthetic construct
  misc_feature 1..21: note = Artificial sequence related to HLA knockouts in cell therapy
  source 1..21: mol_type = other DNA
gccaatcagtgtcgtcgcggt

SEQ ID NO: 20066 - DNA, 21 bp, synthetic construct
  misc_feature 1..21: note = Artificial sequence related to HLA knockouts in cell therapy
  source 1..21: mol_type = other DNA
ccaatcagtgtcgtcgcggtc

SEQ ID NO: 20067 - DNA, 21 bp, synthetic construct
  misc_feature 1..21: note = Artificial sequence related to HLA knockouts in cell therapy
  source 1..21: mol_type = other DNA
caatcagtgtcgtcgcggtcg

SEQ ID NO: 20068 - DNA, 21 bp, synthetic construct
  misc_feature 1..21: note = Artificial sequence related to HLA knockouts in cell therapy
  source 1..21: mol_type = other DNA
aatcagtgtcgtcgcggtcgc

SEQ ID NO: 20069 - DNA, 21 bp, synthetic construct
  misc_feature 1..21: note = Artificial sequence related to HLA knockouts in cell therapy
  source 1..21: mol_type = other DNA
atcagtgtcgtcgcggtcgcg

SEQ ID NO: 20070 - DNA, 21 bp, synthetic construct
  misc_feature 1..21: note = Artificial sequence related to HLA knockouts in cell therapy
  source 1..21: mol_type = other DNA
tcagtgtcgtcgcggtcgcgg

SEQ ID NO: 20071 - DNA, 21 bp, synthetic construct
  misc_feature 1..21: note = Artificial sequence related to HLA knockouts in cell therapy
  source 1..21: mol_type = other DNA
cagtgtcgtcgcggtcgcggt

SEQ ID NO: 20072 - DNA, 21 bp, synthetic construct
  misc_feature 1..21: note = Artificial sequence related to HLA knockouts in cell therapy
  source 1..21: mol_type = other DNA
agtgtcgtcgcggtcgcggtt

SEQ ID NO: 20073 - DNA, 21 bp, synthetic construct
  misc_feature 1..21: note = Artificial sequence related to HLA knockouts in cell therapy
  source 1..21: mol_type = other DNA
gtgtcgtcgcggtcgcggttc

SEQ ID NO: 20074 - DNA, 21 bp, synthetic construct
  misc_feature 1..21: note = Artificial sequence related to HLA knockouts in cell therapy
  source 1..21: mol_type = other DNA
tgtcgtcgcggtcgcggttct

SEQ ID NO: 20075 - DNA, 21 bp, synthetic construct
  misc_feature 1..21: note = Artificial sequence related to HLA knockouts in cell therapy
  source 1..21: mol_type = other DNA
gtcgtcgcggtcgcggttcta

SEQ ID NO: 20076 - DNA, 21 bp, synthetic construct
  misc_feature 1..21: note = Artificial sequence related to HLA knockouts in cell therapy
  source 1..21: mol_type = other DNA
tcgtcgcggtcgcggttctaa

SEQ ID NO: 20077 - DNA, 21 bp, synthetic construct
  misc_feature 1..21: note = Artificial sequence related to HLA knockouts in cell therapy
  source 1..21: mol_type = other DNA
cgtcgcggtcgcggttctaaa

SEQ ID NO: 20078 - DNA, 21 bp, synthetic construct
  misc_feature 1..21: note = Artificial sequence related to HLA knockouts in cell therapy
  source 1..21: mol_type = other DNA
gtcgcggtcgcggttctaaag

SEQ ID NO: 20079 - DNA, 21 bp, synthetic construct
  misc_feature 1..21: note = Artificial sequence related to HLA knockouts in cell therapy
  source 1..21: mol_type = other DNA
cgcggtcgcggttctaaagtc

SEQ ID NO: 20080 - DNA, 21 bp, synthetic construct
  misc_feature 1..21: note = Artificial sequence related to HLA knockouts in cell therapy
  source 1..21: mol_type = other DNA
gcggtcgcggttctaaagtcc

SEQ ID NO: 20081 - DNA, 21 bp, synthetic construct
  misc_feature 1..21: note = Artificial sequence related to HLA knockouts in cell therapy
  source 1..21: mol_type = other DNA
cggtcgcggttctaaagtccg

SEQ ID NO: 20082 - DNA, 21 bp, synthetic construct
  misc_feature 1..21: note = Artificial sequence related to HLA knockouts in cell therapy
  source 1..21: mol_type = other DNA
ggtcgcggttctaaagtccgc

SEQ ID NO: 20083 - DNA, 21 bp, synthetic construct
  misc_feature 1..21: note = Artificial sequence related to HLA knockouts in cell therapy
  source 1..21: mol_type = other DNA
cgcggttctaaagtccgcacg

SEQ ID NO: 20084 - DNA, 21 bp, synthetic construct
  misc_feature 1..21: note = Artificial sequence related to HLA knockouts in cell therapy
  source 1..21: mol_type = other DNA
gcggttctaaagtccgcacgc

SEQ ID NO: 20085 - DNA, 21 bp, synthetic construct
  misc_feature 1..21: note = Artificial sequence related to HLA knockouts in cell therapy
  source 1..21: mol_type = other DNA
ctaaagtccgcacgcacccac

SEQ ID NO: 20086 - DNA, 21 bp, synthetic construct
  misc_feature 1..21: note = Artificial sequence related to HLA knockouts in cell therapy
  source 1..21: mol_type = other DNA
taaagtccgcacgcacccacc

SEQ ID NO: 20087 - DNA, 21 bp, synthetic construct
  misc_feature 1..21: note = Artificial sequence related to HLA knockouts in cell therapy
  source 1..21: mol_type = other DNA
aaagtccgcacgcacccaccg

SEQ ID NO: 20088 - DNA, 21 bp, synthetic construct
  misc_feature 1..21: note = Artificial sequence related to HLA knockouts in cell therapy
  source 1..21: mol_type = other DNA
aagtccgcacgcacccaccgg

SEQ ID NO: 20089 - DNA, 21 bp, synthetic construct
  misc_feature 1..21: note = Artificial sequence related to HLA knockouts in cell therapy
  source 1..21: mol_type = other DNA
agtccgcacgcacccaccggg

SEQ ID NO: 20090 - DNA, 21 bp, synthetic construct
  misc_feature 1..21: note = Artificial sequence related to HLA knockouts in cell therapy
  source 1..21: mol_type = other DNA
gtccgcacgcacccaccggga

SEQ ID NO: 20091 - DNA, 21 bp, synthetic construct
  misc_feature 1..21: note = Artificial sequence related to HLA knockouts in cell therapy
  source 1..21: mol_type = other DNA
tccgcacgcacccaccgggac

SEQ ID NO: 20092 - DNA, 21 bp, synthetic construct
  misc_feature 1..21: note = Artificial sequence related to HLA knockouts in cell therapy
  source 1..21: mol_type = other DNA
ccgcacgcacccaccgggact

SEQ ID NO: 20093 - DNA, 21 bp, synthetic construct
  misc_feature 1..21: note = Artificial sequence related to HLA knockouts in cell therapy
  source 1..21: mol_type = other DNA
cgcacgcacccaccgggactc

SEQ ID NO: 20094 - DNA, 21 bp, synthetic construct
  misc_feature 1..21: note = Artificial sequence related to HLA knockouts in cell therapy
  source 1..21: mol_type = other DNA
gcacgcacccaccgggactca

SEQ ID NO: 20095 - DNA, 21 bp, synthetic construct
  misc_feature 1..21: note = Artificial sequence related to HLA knockouts in cell therapy
  source 1..21: mol_type = other DNA
cacgcacccaccgggactcag

SEQ ID NO: 20096 - DNA, 21 bp, synthetic construct
  misc_feature 1..21: note = Artificial sequence related to HLA knockouts in cell therapy
  source 1..21: mol_type = other DNA
acgcacccaccgggactcaga

SEQ ID NO: 20097 - DNA, 21 bp, synthetic construct
  misc_feature 1..21: note = Artificial sequence related to HLA knockouts in cell therapy
  source 1..21: mol_type = other DNA
cgcacccaccgggactcagat

SEQ ID NO: 20098 - DNA, 21 bp, synthetic construct
  misc_feature 1..21: note = Artificial sequence related to HLA knockouts in cell therapy
  source 1..21: mol_type = other DNA
gcacccaccgggactcagatt

SEQ ID NO: 20099 - DNA, 21 bp, synthetic construct
  misc_feature 1..21: note = Artificial sequence related to HLA knockouts in cell therapy
  source 1..21: mol_type = other DNA
cacccaccgggactcagattc

SEQ ID NO: 20100 - DNA, 21 bp, synthetic construct
  misc_feature 1..21: note = Artificial sequence related to HLA knockouts in cell therapy
  source 1..21: mol_type = other DNA
cccaccgggactcagattctc

SEQ ID NO: 20101 - DNA, 21 bp, synthetic construct
  misc_feature 1..21: note = Artificial sequence related to HLA knockouts in cell therapy
  source 1..21: mol_type = other DNA
ccaccgggactcagattctcc

SEQ ID NO: 20102 - DNA, 21 bp, synthetic construct
  misc_feature 1..21: note = Artificial sequence related to HLA knockouts in cell therapy
  source 1..21: mol_type = other DNA
caccgggactcagattctccc

SEQ ID NO: 20103 - DNA, 21 bp, synthetic construct
  misc_feature 1..21: note = Artificial sequence related to HLA knockouts in cell therapy
  source 1..21: mol_type = other DNA
accgggactcagattctcccc

SEQ ID NO: 20104 - DNA, 21 bp, synthetic construct
  misc_feature 1..21: note = Artificial sequence related to HLA knockouts in cell therapy
  source 1..21: mol_type = other DNA
ccgggactcagattctcccca

SEQ ID NO: 20105 - DNA, 21 bp, synthetic construct
  misc_feature 1..21: note = Artificial sequence related to HLA knockouts in cell therapy
  source 1..21: mol_type = other DNA
cgggactcagattctccccag

SEQ ID NO: 20106 - DNA, 21 bp, synthetic construct
  misc_feature 1..21: note = Artificial sequence related to HLA knockouts in cell therapy
  source 1..21: mol_type = other DNA
ctcagattctccccagacgcc

SEQ ID NO: 20107 - DNA, 21 bp, synthetic construct
  misc_feature 1..21: note = Artificial sequence related to HLA knockouts in cell therapy
  source 1..21: mol_type = other DNA
tcagattctccccagacgccg

SEQ ID NO: 20108 - DNA, 21 bp, synthetic construct
  misc_feature 1..21: note = Artificial sequence related to HLA knockouts in cell therapy
  source 1..21: mol_type = other DNA
cagattctccccagacgccga

SEQ ID NO: 20109 - DNA, 21 bp, synthetic construct
  misc_feature 1..21: note = Artificial sequence related to HLA knockouts in cell therapy
  source 1..21: mol_type = other DNA
agattctccccagacgccgag

SEQ ID NO: 20110 - DNA, 21 bp, synthetic construct
  misc_feature 1..21: note = Artificial sequence related to HLA knockouts in cell therapy
  source 1..21: mol_type = other DNA
gattctccccagacgccgagg

SEQ ID NO: 20111 - DNA, 21 bp, synthetic construct
  misc_feature 1..21: note = Artificial sequence related to HLA knockouts in cell therapy
  source 1..21: mol_type = other DNA
attctccccagacgccgagga

SEQ ID NO: 20112 - DNA, 21 bp, synthetic construct
  misc_feature 1..21: note = Artificial sequence related to HLA knockouts in cell therapy
  source 1..21: mol_type = other DNA
ttctccccagacgccgaggat

SEQ ID NO: 20113 - DNA, 21 bp, synthetic construct
  misc_feature 1..21: note = Artificial sequence related to HLA knockouts in cell therapy
  source 1..21: mol_type = other DNA
tctccccagacgccgaggatg

SEQ ID NO: 20114 - DNA, 21 bp, synthetic construct
  misc_feature 1..21: note = Artificial sequence related to HLA knockouts in cell therapy
  source 1..21: mol_type = other DNA
ctccccagacgccgaggatgg

SEQ ID NO: 20115 - DNA, 21 bp, synthetic construct
  misc_feature 1..21: note = Artificial sequence related to HLA knockouts in cell therapy
  source 1..21: mol_type = other DNA
tccccagacgccgaggatggc

SEQ ID NO: 20116 - DNA, 21 bp, synthetic construct
  misc_feature 1..21: note = Artificial sequence related to HLA knockouts in cell therapy
  source 1..21: mol_type = other DNA
ccccagacgccgaggatggcc

SEQ ID NO: 20117 - DNA, 21 bp, synthetic construct
  misc_feature 1..21: note = Artificial sequence related to HLA knockouts in cell therapy
  source 1..21: mol_type = other DNA
cccagacgccgaggatggccg

SEQ ID NO: 20118 - DNA, 21 bp, synthetic construct
  misc_feature 1..21: note = Artificial sequence related to HLA knockouts in cell therapy
  source 1..21: mol_type = other DNA
ccagacgccgaggatggccgt

SEQ ID NO: 20119 - DNA, 21 bp, synthetic construct
  misc_feature 1..21: note = Artificial sequence related to HLA knockouts in cell therapy
  source 1..21: mol_type = other DNA
cagacgccgaggatggccgtc

SEQ ID NO: 20120 - DNA, 21 bp, synthetic construct
  misc_feature 1..21: note = Artificial sequence related to HLA knockouts in cell therapy
  source 1..21: mol_type = other DNA
agacgccgaggatggccgtca

SEQ ID NO: 20121 - DNA, 21 bp, synthetic construct
  misc_feature 1..21: note = Artificial sequence related to HLA knockouts in cell therapy
  source 1..21: mol_type = other DNA
gacgccgaggatggccgtcat

SEQ ID NO: 20122 - DNA, 21 bp, synthetic construct
  misc_feature 1..21: note = Artificial sequence related to HLA knockouts in cell therapy
  source 1..21: mol_type = other DNA
acgccgaggatggccgtcatg

SEQ ID NO: 20123 - DNA, 21 bp, synthetic construct
  misc_feature 1..21: note = Artificial sequence related to HLA knockouts in cell therapy
  source 1..21: mol_type = other DNA
cgccgaggatggccgtcatgg

SEQ ID NO: 20124 - DNA, 21 bp, synthetic construct
  misc_feature 1..21: note = Artificial sequence related to HLA knockouts in cell therapy
  source 1..21: mol_type = other DNA
gccgaggatggccgtcatggc

SEQ ID NO: 20125 - DNA, 21 bp, synthetic construct
  misc_feature 1..21: note = Artificial sequence related to HLA knockouts in cell therapy
  source 1..21: mol_type = other DNA
ccgaggatggccgtcatggcg

SEQ ID NO: 20126 - DNA, 21 bp, synthetic construct
  misc_feature 1..21: note = Artificial sequence related to HLA knockouts in cell therapy
  source 1..21: mol_type = other DNA
cgaggatggccgtcatggcgc

SEQ ID NO: 20127 - DNA, 21 bp, synthetic construct
  misc_feature 1..21: note = Artificial sequence related to HLA knockouts in cell therapy
  source 1..21: mol_type = other DNA
gaggatggccgtcatggcgcc

SEQ ID NO: 20128 - DNA, 21 bp, synthetic construct
  misc_feature 1..21: note = Artificial sequence related to HLA knockouts in cell therapy
  source 1..21: mol_type = other DNA
aggatggccgtcatggcgccc

SEQ ID NO: 20129 - DNA, 21 bp, synthetic construct
  misc_feature 1..21: note = Artificial sequence related to HLA knockouts in cell therapy
  source 1..21: mol_type = other DNA
ggatggccgtcatggcgcccc

SEQ ID NO: 20130 - DNA, 21 bp, synthetic construct
  misc_feature 1..21: note = Artificial sequence related to HLA knockouts in cell therapy
  source 1..21: mol_type = other DNA
gatggccgtcatggcgccccg

SEQ ID NO: 20131 - DNA, 21 bp, synthetic construct
  misc_feature 1..21: note = Artificial sequence related to HLA knockouts in cell therapy
  source 1..21: mol_type = other DNA
atggccgtcatggcgccccga

SEQ ID NO: 20132 - DNA, 21 bp, synthetic construct
  misc_feature 1..21: note = Artificial sequence related to HLA knockouts in cell therapy
  source 1..21: mol_type = other DNA
tggccgtcatggcgccccgaa

SEQ ID NO: 20133 - DNA, 21 bp, synthetic construct
  misc_feature 1..21: note = Artificial sequence related to HLA knockouts in cell therapy
  source 1..21: mol_type = other DNA
ggccgtcatggcgccccgaac

SEQ ID NO: 20134 - DNA, 21 bp, synthetic construct
  misc_feature 1..21: note = Artificial sequence related to HLA knockouts in cell therapy
  source 1..21: mol_type = other DNA
gccgtcatggcgccccgaacc

SEQ ID NO: 20135 - DNA, 21 bp, synthetic construct
  misc_feature 1..21: note = Artificial sequence related to HLA knockouts in cell therapy
  source 1..21: mol_type = other DNA
ccgtcatggcgccccgaaccc

SEQ ID NO: 20136 - DNA, 21 bp, synthetic construct
  misc_feature 1..21: note = Artificial sequence related to HLA knockouts in cell therapy
  source 1..21: mol_type = other DNA
cgtcatggcgccccgaaccct

SEQ ID NO: 20137 - DNA, 21 bp, synthetic construct
  misc_feature 1..21: note = Artificial sequence related to HLA knockouts in cell therapy
  source 1..21: mol_type = other DNA
gtcatggcgccccgaaccctc

SEQ ID NO: 20138 - DNA, 21 bp, synthetic construct
  misc_feature 1..21: note = Artificial sequence related to HLA knockouts in cell therapy
  source 1..21: mol_type = other DNA
tcatggcgccccgaaccctcg

SEQ ID NO: 20139 - DNA, 21 bp, synthetic construct
  misc_feature 1..21: note = Artificial sequence related to HLA knockouts in cell therapy
  source 1..21: mol_type = other DNA
catggcgccccgaaccctcgt

SEQ ID NO: 20140 - DNA, 21 bp, synthetic construct
  misc_feature 1..21: note = Artificial sequence related to HLA knockouts in cell therapy
  source 1..21: mol_type = other DNA
atggcgccccgaaccctcgtc

SEQ ID NO: 20141 - DNA, 21 bp, synthetic construct
  misc_feature 1..21: note = Artificial sequence related to HLA knockouts in cell therapy
  source 1..21: mol_type = other DNA
tggcgccccgaaccctcgtcc

SEQ ID NO: 20142 - DNA, 21 bp, synthetic construct
  misc_feature 1..21: note = Artificial sequence related to HLA knockouts in cell therapy
  source 1..21: mol_type = other DNA
ggcgccccgaaccctcgtcct

SEQ ID NO: 20143 - DNA, 21 bp, synthetic construct
  misc_feature 1..21: note = Artificial sequence related to HLA knockouts in cell therapy
  source 1..21: mol_type = other DNA
gcgccccgaaccctcgtcctg

SEQ ID NO: 20144 - DNA, 21 bp, synthetic construct
  misc_feature 1..21: note = Artificial sequence related to HLA knockouts in cell therapy
  source 1..21: mol_type = other DNA
cgccccgaaccctcgtcctgc

SEQ ID NO: 20145 - DNA, 21 bp, synthetic construct
  misc_feature 1..21: note = Artificial sequence related to HLA knockouts in cell therapy
  source 1..21: mol_type = other DNA
gccccgaaccctcgtcctgct

SEQ ID NO: 20146 - DNA, 21 bp, synthetic construct
  misc_feature 1..21: note = Artificial sequence related to HLA knockouts in cell therapy
  source 1..21: mol_type = other DNA
ccccgaaccctcgtcctgcta

SEQ ID NO: 20147 - DNA, 21 bp, synthetic construct
  misc_feature 1..21: note = Artificial sequence related to HLA knockouts in cell therapy
  source 1..21: mol_type = other DNA
cccgaaccctcgtcctgctac

SEQ ID NO: 20148 - DNA, 21 bp, synthetic construct
  misc_feature 1..21: note = Artificial sequence related to HLA knockouts in cell therapy
  source 1..21: mol_type = other DNA
ccgaaccctcgtcctgctact

SEQ ID NO: 20149 - DNA, 21 bp, synthetic construct
  misc_feature 1..21: note = Artificial sequence related to HLA knockouts in cell therapy
  source 1..21: mol_type = other DNA
cgaaccctcgtcctgctactc

SEQ ID NO: 20150 - DNA, 21 bp, synthetic construct
  misc_feature 1..21: note = Artificial sequence related to HLA knockouts in cell therapy
  source 1..21: mol_type = other DNA
accctcgtcctgctactctcg

SEQ ID NO: 20151 - DNA, 21 bp, synthetic construct
  misc_feature 1..21: note = Artificial sequence related to HLA knockouts in cell therapy
  source 1..21: mol_type = other DNA
ccctcgtcctgctactctcgg

SEQ ID NO: 20152 - DNA, 21 bp, synthetic construct
  misc_feature 1..21: note = Artificial sequence related to HLA knockouts in cell therapy
  source 1..21: mol_type = other DNA
cctcgtcctgctactctcggg

SEQ ID NO: 20153 - DNA, 21 bp, synthetic construct
  misc_feature 1..21: note = Artificial sequence related to HLA knockouts in cell therapy
  source 1..21: mol_type = other DNA
ctcgtcctgctactctcgggg

SEQ ID NO: 20154 - DNA, 21 bp, synthetic construct
  misc_feature 1..21: note = Artificial sequence related to HLA knockouts in cell therapy
  source 1..21: mol_type = other DNA
tcgtcctgctactctcggggg

SEQ ID NO: 20155 - DNA, 21 bp, synthetic construct
  misc_feature 1..21: note = Artificial sequence related to HLA knockouts in cell therapy
  source 1..21: mol_type = other DNA
cgtcctgctactctcgggggc

SEQ ID NO: 20156 - DNA, 21 bp, synthetic construct
  misc_feature 1..21: note = Artificial sequence related to HLA knockouts in cell therapy
  source 1..21: mol_type = other DNA
gtcctgctactctcgggggct

SEQ ID NO: 20157 - DNA, 21 bp, synthetic construct
  misc_feature 1..21: note = Artificial sequence related to HLA knockouts in cell therapy
  source 1..21: mol_type = other DNA
tcctgctactctcgggggctc

SEQ ID NO: 20158 - DNA, 21 bp, synthetic construct
  misc_feature 1..21: note = Artificial sequence related to HLA knockouts in cell therapy
  source 1..21: mol_type = other DNA
cctgctactctcgggggctct

SEQ ID NO: 20159 - DNA, 21 bp, synthetic construct
  misc_feature 1..21: note = Artificial sequence related to HLA knockouts in cell therapy
  source 1..21: mol_type = other DNA
ctgctactctcgggggctctg

SEQ ID NO: 20160 - DNA, 21 bp, synthetic construct
  misc_feature 1..21: note = Artificial sequence related to HLA knockouts in cell therapy
  source 1..21: mol_type = other DNA
tgctactctcgggggctctgg

SEQ ID NO: 20161 - DNA, 21 bp, synthetic construct
  misc_feature 1..21: note = Artificial sequence related to HLA knockouts in cell therapy
  source 1..21: mol_type = other DNA
gctactctcgggggctctggc

SEQ ID NO: 20162 - DNA, 21 bp, synthetic construct
  misc_feature 1..21: note = Artificial sequence related to HLA knockouts in cell therapy
  source 1..21: mol_type = other DNA
ctactctcgggggctctggcc

SEQ ID NO: 20163 - DNA, 21 bp, synthetic construct
  misc_feature 1..21: note = Artificial sequence related to HLA knockouts in cell therapy
  source 1..21: mol_type = other DNA
tactctcgggggctctggccc

SEQ ID NO: 20164 - DNA, 21 bp, synthetic construct
  misc_feature 1..21: note = Artificial sequence related to HLA knockouts in cell therapy
  source 1..21: mol_type = other DNA
actctcgggggctctggccct

SEQ ID NO: 20165 - DNA, 21 bp, synthetic construct
  misc_feature 1..21: note = Artificial sequence related to HLA knockouts in cell therapy
  source 1..21: mol_type = other DNA
ctctcgggggctctggccctg

SEQ ID NO: 20166 - DNA, 21 bp, synthetic construct
  misc_feature 1..21: note = Artificial sequence related to HLA knockouts in cell therapy
  source 1..21: mol_type = other DNA
tctcgggggctctggccctga

SEQ ID NO: 20167 - DNA, 21 bp, synthetic construct
  misc_feature 1..21: note = Artificial sequence related to HLA knockouts in cell therapy
  source 1..21: mol_type = other DNA
ctcgggggctctggccctgac

SEQ ID NO: 20168 - DNA, 21 bp, synthetic construct
  misc_feature 1..21: note = Artificial sequence related to HLA knockouts in cell therapy
  source 1..21: mol_type = other DNA
tcgggggctctggccctgacc

SEQ ID NO: 20169 - DNA, 21 bp, synthetic construct
  misc_feature 1..21: note = Artificial sequence related to HLA knockouts in cell therapy
  source 1..21: mol_type = other DNA
cgggggctctggccctgaccc

SEQ ID NO: 20170 - DNA, 21 bp, synthetic construct
  misc_feature 1..21: note = Artificial sequence related to HLA knockouts in cell therapy
  source 1..21: mol_type = other DNA
gggggctctggccctgaccca

SEQ ID NO: 20171 - DNA, 21 bp, synthetic construct
  misc_feature 1..21: note = Artificial sequence related to HLA knockouts in cell therapy
  source 1..21: mol_type = other DNA
ggggctctggccctgacccag

SEQ ID NO: 20172 - DNA, 21 bp, synthetic construct
  misc_feature 1..21: note = Artificial sequence related to HLA knockouts in cell therapy
  source 1..21: mol_type = other DNA
gggctctggccctgacccaga

SEQ ID NO: 20173 - DNA, 21 bp, synthetic construct
  misc_feature 1..21: note = Artificial sequence related to HLA knockouts in cell therapy
  source 1..21: mol_type = other DNA
ggctctggccctgacccagac

SEQ ID NO: 20174 - DNA, 21 bp, synthetic construct
  misc_feature 1..21: note = Artificial sequence related to HLA knockouts in cell therapy
  source 1..21: mol_type = other DNA
gctctggccctgacccagacc

SEQ ID NO: 20175 - DNA, 21 bp, synthetic construct
  misc_feature 1..21: note = Artificial sequence related to HLA knockouts in cell therapy
  source 1..21: mol_type = other DNA
ctctggccctgacccagacct

SEQ ID NO: 20176 - DNA, 21 bp, synthetic construct
  misc_feature 1..21: note = Artificial sequence related to HLA knockouts in cell therapy
  source 1..21: mol_type = other DNA
tctggccctgacccagacctg

SEQ ID NO: 20177 - DNA, 21 bp, synthetic construct
  misc_feature 1..21: note = Artificial sequence related to HLA knockouts in cell therapy
  source 1..21: mol_type = other DNA
ctggccctgacccagacctgg

SEQ ID NO: 20178 - DNA, 21 bp, synthetic construct
  misc_feature 1..21: note = Artificial sequence related to HLA knockouts in cell therapy
  source 1..21: mol_type = other DNA
tggccctgacccagacctggg

SEQ ID NO: 20179 - DNA, 21 bp, synthetic construct
  misc_feature 1..21: note = Artificial sequence related to HLA knockouts in cell therapy
  source 1..21: mol_type = other DNA
ggccctgacccagacctgggc

SEQ ID NO: 20180 - DNA, 21 bp, synthetic construct
  misc_feature 1..21: note = Artificial sequence related to HLA knockouts in cell therapy
  source 1..21: mol_type = other DNA
gccctgacccagacctgggcg

SEQ ID NO: 20181 - DNA, 21 bp, synthetic construct
  misc_feature 1..21: note = Artificial sequence related to HLA knockouts in cell therapy
  source 1..21: mol_type = other DNA
ccctgacccagacctgggcgg

SEQ ID NO: 20182 - DNA, 21 bp, synthetic construct
  misc_feature 1..21: note = Artificial sequence related to HLA knockouts in cell therapy
  source 1..21: mol_type = other DNA
cctgacccagacctgggcggg

SEQ ID NO: 20183 - DNA, 21 bp, synthetic construct
  misc_feature 1..21: note = Artificial sequence related to HLA knockouts in cell therapy
  source 1..21: mol_type = other DNA
ctgacccagacctgggcgggc

SEQ ID NO: 20184 - DNA, 21 bp, synthetic construct
  misc_feature 1..21: note = Artificial sequence related to HLA knockouts in cell therapy
  source 1..21: mol_type = other DNA
tgacccagacctgggcgggct

SEQ ID NO: 20185 - DNA, 21 bp, synthetic construct
  misc_feature 1..21: note = Artificial sequence related to HLA knockouts in cell therapy
  source 1..21: mol_type = other DNA
gacccagacctgggcgggctc

SEQ ID NO: 20186 - DNA, 21 bp, synthetic construct
  misc_feature 1..21: note = Artificial sequence related to HLA knockouts in cell therapy
  source 1..21: mol_type = other DNA
acccagacctgggcgggctct

SEQ ID NO: 20187 - DNA, 21 bp, synthetic construct
  misc_feature 1..21: note = Artificial sequence related to HLA knockouts in cell therapy
  source 1..21: mol_type = other DNA
cccagacctgggcgggctctc

SEQ ID NO: 20188 - DNA, 21 bp, synthetic construct
  misc_feature 1..21: note = Artificial sequence related to HLA knockouts in cell therapy
  source 1..21: mol_type = other DNA
ccagacctgggcgggctctca

SEQ ID NO: 20189 - DNA, 21 bp, synthetic construct
  misc_feature 1..21: note = Artificial sequence related to HLA knockouts in cell therapy
  source 1..21: mol_type = other DNA
cagacctgggcgggctctcac

SEQ ID NO: 20190 - DNA, 21 bp, synthetic construct
  misc_feature 1..21: note = Artificial sequence related to HLA knockouts in cell therapy
  source 1..21: mol_type = other DNA
agacctgggcgggctctcact

SEQ ID NO: 20191 - DNA, 21 bp, synthetic construct
  misc_feature 1..21: note = Artificial sequence related to HLA knockouts in cell therapy
  source 1..21: mol_type = other DNA
gacctgggcgggctctcactc

SEQ ID NO: 20192 - DNA, 21 bp, synthetic construct
  misc_feature 1..21: note = Artificial sequence related to HLA knockouts in cell therapy
  source 1..21: mol_type = other DNA
acctgggcgggctctcactcc

SEQ ID NO: 20193 - DNA, 21 bp, synthetic construct
  misc_feature 1..21: note = Artificial sequence related to HLA knockouts in cell therapy
  source 1..21: mol_type = other DNA
cctgggcgggctctcactcca

SEQ ID NO: 20194 - DNA, 21 bp, synthetic construct
  misc_feature 1..21: note = Artificial sequence related to HLA knockouts in cell therapy
  source 1..21: mol_type = other DNA
ctgggcgggctctcactccat

SEQ ID NO: 20195 - DNA, 21 bp, synthetic construct
  misc_feature 1..21: note = Artificial sequence related to HLA knockouts in cell therapy
  source 1..21: mol_type = other DNA
tgggcgggctctcactccatg

SEQ ID NO: 20196 - DNA, 21 bp, synthetic construct
  misc_feature 1..21: note = Artificial sequence related to HLA knockouts in cell therapy
  source 1..21: mol_type = other DNA
gggcgggctctcactccatga

SEQ ID NO: 20197 - DNA, 21 bp, synthetic construct
  misc_feature 1..21: note = Artificial sequence related to HLA knockouts in cell therapy
  source 1..21: mol_type = other DNA
ggcgggctctcactccatgag

SEQ ID NO: 20198 - DNA, 21 bp, synthetic construct
  misc_feature 1..21: note = Artificial sequence related to HLA knockouts in cell therapy
  source 1..21: mol_type = other DNA
gcgggctctcactccatgagg

SEQ ID NO: 20199 - DNA, 21 bp, synthetic construct
  misc_feature 1..21: note = Artificial sequence related to HLA knockouts in cell therapy
  source 1..21: mol_type = other DNA
cgggctctcactccatgaggt

SEQ ID NO: 20200 - DNA, 21 bp, synthetic construct
  misc_feature 1..21: note = Artificial sequence related to HLA knockouts in cell therapy
  source 1..21: mol_type = other DNA
tcttcacatccgtgtcccggc

SEQ ID NO: 20201 - DNA, 21 bp, synthetic construct
  misc_feature 1..21: note = Artificial sequence related to HLA knockouts in cell therapy
  source 1..21: mol_type = other DNA
cttcacatccgtgtcccggcc

SEQ ID NO: 20202 - DNA, 21 bp, synthetic construct
  misc_feature 1..21: note = Artificial sequence related to HLA knockouts in cell therapy
  source 1..21: mol_type = other DNA
ttcacatccgtgtcccggccc

SEQ ID NO: 20203 - DNA, 21 bp, synthetic construct
  misc_feature 1..21: note = Artificial sequence related to HLA knockouts in cell therapy
  source 1..21: mol_type = other DNA
tcacatccgtgtcccggcccg

SEQ ID NO: 20204 - DNA, 21 bp, synthetic construct
  misc_feature 1..21: note = Artificial sequence related to HLA knockouts in cell therapy
  source 1..21: mol_type = other DNA
cacatccgtgtcccggcccgg

SEQ ID NO: 20205 - DNA, 21 bp, synthetic construct
  misc_feature 1..21: note = Artificial sequence related to HLA knockouts in cell therapy
  source 1..21: mol_type = other DNA
acatccgtgtcccggcccggc

SEQ ID NO: 20206 - DNA, 21 bp, synthetic construct
  misc_feature 1..21: note = Artificial sequence related to HLA knockouts in cell therapy
  source 1..21: mol_type = other DNA
catccgtgtcccggcccggcc

SEQ ID NO: 20207 - DNA, 21 bp, synthetic construct
  misc_feature 1..21: note = Artificial sequence related to HLA knockouts in cell therapy
  source 1..21: mol_type = other DNA
atccgtgtcccggcccggccg

SEQ ID NO: 20208 - DNA, 21 bp, synthetic construct
  misc_feature 1..21: note = Artificial sequence related to HLA knockouts in cell therapy
  source 1..21: mol_type = other DNA
tccgtgtcccggcccggccgc

SEQ ID NO: 20209 - DNA, 21 bp, synthetic construct
  misc_feature 1..21: note = Artificial sequence related to HLA knockouts in cell therapy
  source 1..21: mol_type = other DNA
ccgtgtcccggcccggccgcg

SEQ ID NO: 20210 - DNA, 21 bp, synthetic construct
  misc_feature 1..21: note = Artificial sequence related to HLA knockouts in cell therapy
  source 1..21: mol_type = other DNA
cgtgtcccggcccggccgcgg

SEQ ID NO: 20211 - DNA, 21 bp, synthetic construct
  misc_feature 1..21: note = Artificial sequence related to HLA knockouts in cell therapy
  source 1..21: mol_type = other DNA
gtgtcccggcccggccgcggg

SEQ ID NO: 20212 - DNA, 21 bp, synthetic construct
  misc_feature 1..21: note = Artificial sequence related to HLA knockouts in cell therapy
  source 1..21: mol_type = other DNA
tgtcccggcccggccgcgggg

SEQ ID NO: 20213 - DNA, 21 bp, synthetic construct
  misc_feature 1..21: note = Artificial sequence related to HLA knockouts in cell therapy
  source 1..21: mol_type = other DNA
gtcccggcccggccgcgggga

SEQ ID NO: 20214 - DNA, 21 bp, synthetic construct
  misc_feature 1..21: note = Artificial sequence related to HLA knockouts in cell therapy
  source 1..21: mol_type = other DNA
tcccggcccggccgcggggag

SEQ ID NO: 20215 - DNA, 21 bp, synthetic construct
  misc_feature 1..21: note = Artificial sequence related to HLA knockouts in cell therapy
  source 1..21: mol_type = other DNA
cccggcccggccgcggggagc

SEQ ID NO: 20216 - DNA, 21 bp, synthetic construct
  misc_feature 1..21: note = Artificial sequence related to HLA knockouts in cell therapy
  source 1..21: mol_type = other DNA
ccggcccggccgcggggagcc

SEQ ID NO: 20217 - DNA, 21 bp, synthetic construct
  misc_feature 1..21: note = Artificial sequence related to HLA knockouts in cell therapy
  source 1..21: mol_type = other DNA
cggcccggccgcggggagccc

SEQ ID NO: 20218 - DNA, 21 bp, synthetic construct
  misc_feature 1..21: note = Artificial sequence related to HLA knockouts in cell therapy
  source 1..21: mol_type = other DNA
ggcccggccgcggggagcccc

SEQ ID NO: 20219 - DNA, 21 bp, synthetic construct
  misc_feature 1..21: note = Artificial sequence related to HLA knockouts in cell therapy
  source 1..21: mol_type = other DNA
gcccggccgcggggagccccg

SEQ ID NO: 20220 - DNA, 21 bp, synthetic construct
  misc_feature 1..21: note = Artificial sequence related to HLA knockouts in cell therapy
  source 1..21: mol_type = other DNA
cccggccgcggggagccccgc

SEQ ID NO: 20221 - DNA, 21 bp, synthetic construct
  misc_feature 1..21: note = Artificial sequence related to HLA knockouts in cell therapy
  source 1..21: mol_type = other DNA
ccggccgcggggagccccgct

SEQ ID NO: 20222 - DNA, 21 bp, synthetic construct
  misc_feature 1..21: note = Artificial sequence related to HLA knockouts in cell therapy
  source 1..21: mol_type = other DNA
cggccgcggggagccccgctt

SEQ ID NO: 20223 - DNA, 21 bp, synthetic construct
  misc_feature 1..21: note = Artificial sequence related to HLA knockouts in cell therapy
  source 1..21: mol_type = other DNA
ggccgcggggagccccgcttc

SEQ ID NO: 20224 - DNA, 21 bp, synthetic construct
  misc_feature 1..21: note = Artificial sequence related to HLA knockouts in cell therapy
  source 1..21: mol_type = other DNA
gccgcggggagccccgcttca

SEQ ID NO: 20225 - DNA, 21 bp, synthetic construct
  misc_feature 1..21: note = Artificial sequence related to HLA knockouts in cell therapy
  source 1..21: mol_type = other DNA
ccgcggggagccccgcttcat

SEQ ID NO: 20226 - DNA, 21 bp, synthetic construct
  misc_feature 1..21: note = Artificial sequence related to HLA knockouts in cell therapy
  source 1..21: mol_type = other DNA
cgcggggagccccgcttcatc

SEQ ID NO: 20227 - DNA, 21 bp, synthetic construct
  misc_feature 1..21: note = Artificial sequence related to HLA knockouts in cell therapy
  source 1..21: mol_type = other DNA
gcggggagccccgcttcatcg

SEQ ID NO: 20228 - DNA, 21 bp, synthetic construct
  misc_feature 1..21: note = Artificial sequence related to HLA knockouts in cell therapy
  source 1..21: mol_type = other DNA
cggggagccccgcttcatcgc

SEQ ID NO: 20229 - DNA, 21 bp, synthetic construct
  misc_feature 1..21: note = Artificial sequence related to HLA knockouts in cell therapy
  source 1..21: mol_type = other DNA
ggggagccccgcttcatcgca

SEQ ID NO: 20230 - DNA, 21 bp, synthetic construct
  misc_feature 1..21: note = Artificial sequence related to HLA knockouts in cell therapy
  source 1..21: mol_type = other DNA
gggagccccgcttcatcgcag

SEQ ID NO: 20231 - DNA, 21 bp, synthetic construct
  misc_feature 1..21: note = Artificial sequence related to HLA knockouts in cell therapy
  source 1..21: mol_type = other DNA
ggagccccgcttcatcgcagt

SEQ ID NO: 20232 - DNA, 21 bp, synthetic construct
  misc_feature 1..21: note = Artificial sequence related to HLA knockouts in cell therapy
  source 1..21: mol_type = other DNA
gagccccgcttcatcgcagtg

SEQ ID NO: 20233 - DNA, 21 bp, synthetic construct
  misc_feature 1..21: note = Artificial sequence related to HLA knockouts in cell therapy
  source 1..21: mol_type = other DNA
agccccgcttcatcgcagtgg

SEQ ID NO: 20234 - DNA, 21 bp, synthetic construct
  misc_feature 1..21: note = Artificial sequence related to HLA knockouts in cell therapy
  source 1..21: mol_type = other DNA
gccccgcttcatcgcagtggg

SEQ ID NO: 20235 - DNA, 21 bp, synthetic construct
  misc_feature 1..21: note = Artificial sequence related to HLA knockouts in cell therapy
  source 1..21: mol_type = other DNA
ccccgcttcatcgcagtgggc

SEQ ID NO: 20236 - DNA, 21 bp, synthetic construct
  misc_feature 1..21: note = Artificial sequence related to HLA knockouts in cell therapy
  source 1..21: mol_type = other DNA
cccgcttcatcgcagtgggct

SEQ ID NO: 20237 - DNA, 21 bp, synthetic construct
  misc_feature 1..21: note = Artificial sequence related to HLA knockouts in cell therapy
  source 1..21: mol_type = other DNA
ccgcttcatcgcagtgggcta

SEQ ID NO: 20238 - DNA, 21 bp, synthetic construct
  misc_feature 1..21: note = Artificial sequence related to HLA knockouts in cell therapy
  source 1..21: mol_type = other DNA
cgcttcatcgcagtgggctac

SEQ ID NO: 20239 - DNA, 21 bp, synthetic construct
  misc_feature 1..21: note = Artificial sequence related to HLA knockouts in cell therapy
  source 1..21: mol_type = other DNA
gcttcatcgcagtgggctacg

SEQ ID NO: 20240 - DNA, 21 bp, synthetic construct
  misc_feature 1..21: note = Artificial sequence related to HLA knockouts in cell therapy
  source 1..21: mol_type = other DNA
tcatcgcagtgggctacgtgg

SEQ ID NO: 20241 - DNA, 21 bp, synthetic construct
  misc_feature 1..21: note = Artificial sequence related to HLA knockouts in cell therapy
  source 1..21: mol_type = other DNA
catcgcagtgggctacgtgga

SEQ ID NO: 20242 - DNA, 21 bp, synthetic construct
  misc_feature 1..21: note = Artificial sequence related to HLA knockouts in cell therapy
  source 1..21: mol_type = other DNA
atcgcagtgggctacgtggac

SEQ ID NO: 20243 - DNA, 21 bp, synthetic construct
  misc_feature 1..21: note = Artificial sequence related to HLA knockouts in cell therapy
  source 1..21: mol_type = other DNA
tcgcagtgggctacgtggacg

SEQ ID NO: 20244 - DNA, 21 bp, synthetic construct
  misc_feature 1..21: note = Artificial sequence related to HLA knockouts in cell therapy
  source 1..21: mol_type = other DNA
cgcagtgggctacgtggacga

SEQ ID NO: 20245 - DNA, 21 bp, synthetic construct
  misc_feature 1..21: note = Artificial sequence related to HLA knockouts in cell therapy
  source 1..21: mol_type = other DNA
gcagtgggctacgtggacgac

SEQ ID NO: 20246 - DNA, 21 bp, synthetic construct
  misc_feature 1..21: note = Artificial sequence related to HLA knockouts in cell therapy
  source 1..21: mol_type = other DNA
cagtgggctacgtggacgaca

SEQ ID NO: 20247 - DNA, 21 bp, synthetic construct
  misc_feature 1..21: note = Artificial sequence related to HLA knockouts in cell therapy
  source 1..21: mol_type = other DNA
agtgggctacgtggacgacac

SEQ ID NO: 20248 - DNA, 21 bp, synthetic construct
  misc_feature 1..21: note = Artificial sequence related to HLA knockouts in cell therapy
  source 1..21: mol_type = other DNA
gtgggctacgtggacgacacg

SEQ ID NO: 20249 - DNA, 21 bp, synthetic construct
  misc_feature 1..21: note = Artificial sequence related to HLA knockouts in cell therapy
  source 1..21: mol_type = other DNA
tgggctacgtggacgacacgc

SEQ ID NO: 20250 - DNA, 21 bp, synthetic construct
  misc_feature 1..21: note = Artificial sequence related to HLA knockouts in cell therapy
  source 1..21: mol_type = other DNA
gggctacgtggacgacacgca

SEQ ID NO: 20251 - DNA, 21 bp, synthetic construct
  misc_feature 1..21: note = Artificial sequence related to HLA knockouts in cell therapy
  source 1..21: mol_type = other DNA
ggctacgtggacgacacgcag

SEQ ID NO: 20252 - DNA, 21 bp, synthetic construct
  misc_feature 1..21: note = Artificial sequence related to HLA knockouts in cell therapy
  source 1..21: mol_type = other DNA
gctacgtggacgacacgcagt

SEQ ID NO: 20253 - DNA, 21 bp, synthetic construct
  misc_feature 1..21: note = Artificial sequence related to HLA knockouts in cell therapy
  source 1..21: mol_type = other DNA
acgtggacgacacgcagttcg

SEQ ID NO: 20254 - DNA, 21 bp, synthetic construct
  misc_feature 1..21: note = Artificial sequence related to HLA knockouts in cell therapy
  source 1..21: mol_type = other DNA
cgtggacgacacgcagttcgt

SEQ ID NO: 20255 - DNA, 21 bp, synthetic construct
  misc_feature 1..21: note = Artificial sequence related to HLA knockouts in cell therapy
  source 1..21: mol_type = other DNA
gtggacgacacgcagttcgtg

SEQ ID NO: 20256 - DNA, 21 bp, synthetic construct
  misc_feature 1..21: note = Artificial sequence related to HLA knockouts in cell therapy
  source 1..21: mol_type = other DNA
tggacgacacgcagttcgtgc

SEQ ID NO: 20257 - DNA, 21 bp, synthetic construct
  misc_feature 1..21: note = Artificial sequence related to HLA knockouts in cell therapy
  source 1..21: mol_type = other DNA
ggacgacacgcagttcgtgcg

SEQ ID NO: 20258 - DNA, 21 bp, synthetic construct
  misc_feature 1..21: note = Artificial sequence related to HLA knockouts in cell therapy
  source 1..21: mol_type = other DNA
gacgacacgcagttcgtgcgg

SEQ ID NO: 20259 - DNA, 21 bp, synthetic construct
  misc_feature 1..21: note = Artificial sequence related to HLA knockouts in cell therapy
  source 1..21: mol_type = other DNA
acgacacgcagttcgtgcggt

SEQ ID NO: 20260 - DNA, 21 bp, synthetic construct
  misc_feature 1..21: note = Artificial sequence related to HLA knockouts in cell therapy
  source 1..21: mol_type = other DNA
cgacacgcagttcgtgcggtt

SEQ ID NO: 20261 - DNA, 21 bp, synthetic construct
  misc_feature 1..21: note = Artificial sequence related to HLA knockouts in cell therapy
  source 1..21: mol_type = other DNA
gacacgcagttcgtgcggttc

SEQ ID NO: 20262 - DNA, 21 bp, synthetic construct
  misc_feature 1..21: note = Artificial sequence related to HLA knockouts in cell therapy
  source 1..21: mol_type = other DNA
acacgcagttcgtgcggttcg

SEQ ID NO: 20263 - DNA, 21 bp, synthetic construct
  misc_feature 1..21: note = Artificial sequence related to HLA knockouts in cell therapy
  source 1..21: mol_type = other DNA
cacgcagttcgtgcggttcga

SEQ ID NO: 20264 - DNA, 21 bp, synthetic construct
  misc_feature 1..21: note = Artificial sequence related to HLA knockouts in cell therapy
  source 1..21: mol_type = other DNA
acgcagttcgtgcggttcgac

SEQ ID NO: 20265 - DNA, 21 bp, synthetic construct
  misc_feature 1..21: note = Artificial sequence related to HLA knockouts in cell therapy
  source 1..21: mol_type = other DNA
cgcagttcgtgcggttcgaca

SEQ ID NO: 20266 - DNA, 21 bp, synthetic construct
  misc_feature 1..21: note = Artificial sequence related to HLA knockouts in cell therapy
  source 1..21: mol_type = other DNA
gcagttcgtgcggttcgacag

SEQ ID NO: 20267 - DNA, 21 bp, synthetic construct
  misc_feature 1..21: note = Artificial sequence related to HLA knockouts in cell therapy
  source 1..21: mol_type = other DNA
cagttcgtgcggttcgacagc

SEQ ID NO: 20268 - DNA, 21 bp, synthetic construct
  misc_feature 1..21: note = Artificial sequence related to HLA knockouts in cell therapy
  source 1..21: mol_type = other DNA
agttcgtgcggttcgacagcg

SEQ ID NO: 20269 - DNA, 21 bp, synthetic construct
  misc_feature 1..21: note = Artificial sequence related to HLA knockouts in cell therapy
  source 1..21: mol_type = other DNA
gttcgtgcggttcgacagcga

SEQ ID NO: 20270 - DNA, 21 bp, synthetic construct
  misc_feature 1..21: note = Artificial sequence related to HLA knockouts in cell therapy
  source 1..21: mol_type = other DNA
ttcgtgcggttcgacagcgac

SEQ ID NO: 20271 - DNA, 21 bp, synthetic construct
  misc_feature 1..21: note = Artificial sequence related to HLA knockouts in cell therapy
  source 1..21: mol_type = other DNA
tcgtgcggttcgacagcgacg

SEQ ID NO: 20272 - DNA, 21 bp, synthetic construct
  misc_feature 1..21: note = Artificial sequence related to HLA knockouts in cell therapy
  source 1..21: mol_type = other DNA
cgtgcggttcgacagcgacgc

SEQ ID NO: 20273 - DNA, 21 bp, synthetic construct
  misc_feature 1..21: note = Artificial sequence related to HLA knockouts in cell therapy
  source 1..21: mol_type = other DNA
gtgcggttcgacagcgacgcc

SEQ ID NO: 20274 - DNA, 21 bp, synthetic construct
  misc_feature 1..21: note = Artificial sequence related to HLA knockouts in cell therapy
  source 1..21: mol_type = other DNA
tgcggttcgacagcgacgccg

SEQ ID NO: 20275 - DNA, 21 bp, synthetic construct
  misc_feature 1..21: note = Artificial sequence related to HLA knockouts in cell therapy
  source 1..21: mol_type = other DNA
gcggttcgacagcgacgccgc

SEQ ID NO: 20276 - DNA, 21 bp, synthetic construct
  misc_feature 1..21: note = Artificial sequence related to HLA knockouts in cell therapy
  source 1..21: mol_type = other DNA
cggttcgacagcgacgccgcg

SEQ ID NO: 20277 - DNA, 21 bp, synthetic construct
  misc_feature 1..21: note = Artificial sequence related to HLA knockouts in cell therapy
  source 1..21: mol_type = other DNA
ggttcgacagcgacgccgcga

SEQ ID NO: 20278 - DNA, 21 bp, synthetic construct
  misc_feature 1..21: note = Artificial sequence related to HLA knockouts in cell therapy
  source 1..21: mol_type = other DNA
gttcgacagcgacgccgcgag

SEQ ID NO: 20279 - DNA, 21 bp, synthetic construct
  misc_feature 1..21: note = Artificial sequence related to HLA knockouts in cell therapy
  source 1..21: mol_type = other DNA
ttcgacagcgacgccgcgagc

SEQ ID NO: 20280 - DNA, 21 bp, synthetic construct
  misc_feature 1..21: note = Artificial sequence related to HLA knockouts in cell therapy
  source 1..21: mol_type = other DNA
tcgacagcgacgccgcgagcc

SEQ ID NO: 20281 - DNA, 21 bp, synthetic construct
  misc_feature 1..21: note = Artificial sequence related to HLA knockouts in cell therapy
  source 1..21: mol_type = other DNA
cgacagcgacgccgcgagcca

SEQ ID NO: 20282 - DNA, 21 bp, synthetic construct
  misc_feature 1..21: note = Artificial sequence related to HLA knockouts in cell therapy
  source 1..21: mol_type = other DNA
gacagcgacgccgcgagccag

SEQ ID NO: 20283 - DNA, 21 bp, synthetic construct
  misc_feature 1..21: note = Artificial sequence related to HLA knockouts in cell therapy
  source 1..21: mol_type = other DNA
acagcgacgccgcgagccaga

SEQ ID NO: 20284 - DNA, 21 bp, synthetic construct
  misc_feature 1..21: note = Artificial sequence related to HLA knockouts in cell therapy
  source 1..21: mol_type = other DNA
cagcgacgccgcgagccagag

SEQ ID NO: 20285 - DNA, 21 bp, synthetic construct
  misc_feature 1..21: note = Artificial sequence related to HLA knockouts in cell therapy
  source 1..21: mol_type = other DNA
agcgacgccgcgagccagagg

SEQ ID NO: 20286 - DNA, 21 bp, synthetic construct
  misc_feature 1..21: note = Artificial sequence related to HLA knockouts in cell therapy
  source 1..21: mol_type = other DNA
gcgacgccgcgagccagagga

SEQ ID NO: 20287 - DNA, 21 bp, synthetic construct
  misc_feature 1..21: note = Artificial sequence related to HLA knockouts in cell therapy
  source 1..21: mol_type = other DNA
cgacgccgcgagccagaggat

SEQ ID NO: 20288 - DNA, 21 bp, synthetic construct
  misc_feature 1..21: note = Artificial sequence related to HLA knockouts in cell therapy
  source 1..21: mol_type = other DNA
gacgccgcgagccagaggatg

SEQ ID NO: 20289 - DNA, 21 bp, synthetic construct
  misc_feature 1..21: note = Artificial sequence related to HLA knockouts in cell therapy
  source 1..21: mol_type = other DNA
acgccgcgagccagaggatgg

SEQ ID NO: 20290 - DNA, 21 bp, synthetic construct
  misc_feature 1..21: note = Artificial sequence related to HLA knockouts in cell therapy
  source 1..21: mol_type = other DNA
cgccgcgagccagaggatgga

SEQ ID NO: 20291 - DNA, 21 bp, synthetic construct
  misc_feature 1..21: note = Artificial sequence related to HLA knockouts in cell therapy
  source 1..21: mol_type = other DNA
gccgcgagccagaggatggag

SEQ ID NO: 20292 - DNA, 21 bp, synthetic construct
  misc_feature 1..21: note = Artificial sequence related to HLA knockouts in cell therapy
  source 1..21: mol_type = other DNA
ccgcgagccagaggatggagc

SEQ ID NO: 20293 - DNA, 21 bp, synthetic construct
  misc_feature 1..21: note = Artificial sequence related to HLA knockouts in cell therapy
  source 1..21: mol_type = other DNA
cgcgagccagaggatggagcc

SEQ ID NO: 20294 - DNA, 21 bp, synthetic construct
  misc_feature 1..21: note = Artificial sequence related to HLA knockouts in cell therapy
  source 1..21: mol_type = other DNA
gcgagccagaggatggagccg

SEQ ID NO: 20295 - DNA, 21 bp, synthetic construct
  misc_feature 1..21: note = Artificial sequence related to HLA knockouts in cell therapy
  source 1..21: mol_type = other DNA
cgagccagaggatggagccgc

SEQ ID NO: 20296 - DNA, 21 bp, synthetic construct
  misc_feature 1..21: note = Artificial sequence related to HLA knockouts in cell therapy
  source 1..21: mol_type = other DNA
gagccagaggatggagccgcg

SEQ ID NO: 20297 - DNA, 21 bp, synthetic construct
  misc_feature 1..21: note = Artificial sequence related to HLA knockouts in cell therapy
  source 1..21: mol_type = other DNA
agccagaggatggagccgcgg

SEQ ID NO: 20298 - DNA, 21 bp, synthetic construct
  misc_feature 1..21: note = Artificial sequence related to HLA knockouts in cell therapy
  source 1..21: mol_type = other DNA
gccagaggatggagccgcggg

SEQ ID NO: 20299 - DNA, 21 bp, synthetic construct
  misc_feature 1..21: note = Artificial sequence related to HLA knockouts in cell therapy
  source 1..21: mol_type = other DNA
ccagaggatggagccgcgggc

SEQ ID NO: 20300 - DNA, 21 bp, synthetic construct
  misc_feature 1..21: note = Artificial sequence related to HLA knockouts in cell therapy
  source 1..21: mol_type = other DNA
cagaggatggagccgcgggcg

SEQ ID NO: 20301 - DNA, 21 bp, synthetic construct
  misc_feature 1..21: note = Artificial sequence related to HLA knockouts in cell therapy
  source 1..21: mol_type = other DNA
agaggatggagccgcgggcgc

SEQ ID NO: 20302 - DNA, 21 bp, synthetic construct
  misc_feature 1..21: note = Artificial sequence related to HLA knockouts in cell therapy
  source 1..21: mol_type = other DNA
gaggatggagccgcgggcgcc

SEQ ID NO: 20303 - DNA, 21 bp, synthetic construct
  misc_feature 1..21: note = Artificial sequence related to HLA knockouts in cell therapy
  source 1..21: mol_type = other DNA
aggatggagccgcgggcgccg

SEQ ID NO: 20304 - DNA, 21 bp, synthetic construct
  misc_feature 1..21: note = Artificial sequence related to HLA knockouts in cell therapy
  source 1..21: mol_type = other DNA
ggatggagccgcgggcgccgt

SEQ ID NO: 20305 - DNA, 21 bp, synthetic construct
  misc_feature 1..21: note = Artificial sequence related to HLA knockouts in cell therapy
  source 1..21: mol_type = other DNA
gatggagccgcgggcgccgtg

SEQ ID NO: 20306 - DNA, 21 bp, synthetic construct
  misc_feature 1..21: note = Artificial sequence related to HLA knockouts in cell therapy
  source 1..21: mol_type = other DNA
atggagccgcgggcgccgtgg

SEQ ID NO: 20307 - DNA, 21 bp, synthetic construct
  misc_feature 1..21: note = Artificial sequence related to HLA knockouts in cell therapy
  source 1..21: mol_type = other DNA
tggagccgcgggcgccgtgga

SEQ ID NO: 20308 - DNA, 21 bp, synthetic construct
  misc_feature 1..21: note = Artificial sequence related to HLA knockouts in cell therapy
  source 1..21: mol_type = other DNA
ggagccgcgggcgccgtggat

SEQ ID NO: 20309 - DNA, 21 bp, synthetic construct
  misc_feature 1..21: note = Artificial sequence related to HLA knockouts in cell therapy
  source 1..21: mol_type = other DNA
gagccgcgggcgccgtggata

SEQ ID NO: 20310 - DNA, 21 bp, synthetic construct
  misc_feature 1..21: note = Artificial sequence related to HLA knockouts in cell therapy
  source 1..21: mol_type = other DNA
agccgcgggcgccgtggatag

SEQ ID NO: 20311 - DNA, 21 bp, synthetic construct
  misc_feature 1..21: note = Artificial sequence related to HLA knockouts in cell therapy
  source 1..21: mol_type = other DNA
gccgcgggcgccgtggataga

SEQ ID NO: 20312 - DNA, 21 bp, synthetic construct
  misc_feature 1..21: note = Artificial sequence related to HLA knockouts in cell therapy
  source 1..21: mol_type = other DNA
ccgcgggcgccgtggatagag

SEQ ID NO: 20313 - DNA, 21 bp, synthetic construct
  misc_feature 1..21: note = Artificial sequence related to HLA knockouts in cell therapy
  source 1..21: mol_type = other DNA
cgcgggcgccgtggatagagc

SEQ ID NO: 20314 - DNA, 21 bp, synthetic construct
  misc_feature 1..21: note = Artificial sequence related to HLA knockouts in cell therapy
  source 1..21: mol_type = other DNA
gcgggcgccgtggatagagca

SEQ ID NO: 20315 - DNA, 21 bp, synthetic construct
  misc_feature 1..21: note = Artificial sequence related to HLA knockouts in cell therapy
  source 1..21: mol_type = other DNA
cgggcgccgtggatagagcag

SEQ ID NO: 20316 - DNA, 21 bp, synthetic construct
  misc_feature 1..21: note = Artificial sequence related to HLA knockouts in cell therapy
  source 1..21: mol_type = other DNA
gggcgccgtggatagagcagg

SEQ ID NO: 20317 - DNA, 21 bp, synthetic construct
  misc_feature 1..21: note = Artificial sequence related to HLA knockouts in cell therapy
  source 1..21: mol_type = other DNA
ggcgccgtggatagagcagga

SEQ ID NO: 20318 - DNA, 21 bp, synthetic construct
  misc_feature 1..21: note = Artificial sequence related to HLA knockouts in cell therapy
  source 1..21: mol_type = other DNA
gcgccgtggatagagcaggag

SEQ ID NO: 20319 - DNA, 21 bp, synthetic construct
  misc_feature 1..21: note = Artificial sequence related to HLA knockouts in cell therapy
  source 1..21: mol_type = other DNA
cgccgtggatagagcaggagg

SEQ ID NO: 20320 - DNA, 21 bp, synthetic construct
  misc_feature 1..21: note = Artificial sequence related to HLA knockouts in cell therapy
  source 1..21: mol_type = other DNA
gccgtggatagagcaggaggg

SEQ ID NO: 20321 - DNA, 21 bp, synthetic construct
  misc_feature 1..21: note = Artificial sequence related to HLA knockouts in cell therapy
  source 1..21: mol_type = other DNA
ccgtggatagagcaggagggt

SEQ ID NO: 20322 - DNA, 21 bp, synthetic construct
  misc_feature 1..21: note = Artificial sequence related to HLA knockouts in cell therapy
  source 1..21: mol_type = other DNA
cgtggatagagcaggagggtc

SEQ ID NO: 20323 - DNA, 21 bp, synthetic construct
  misc_feature 1..21: note = Artificial sequence related to HLA knockouts in cell therapy
  source 1..21: mol_type = other DNA
gtggatagagcaggagggtcc

SEQ ID NO: 20324 - DNA, 21 bp, synthetic construct
  misc_feature 1..21: note = Artificial sequence related to HLA knockouts in cell therapy
  source 1..21: mol_type = other DNA
tggatagagcaggagggtccg

SEQ ID NO: 20325 - DNA, 21 bp, synthetic construct
  misc_feature 1..21: note = Artificial sequence related to HLA knockouts in cell therapy
  source 1..21: mol_type = other DNA
ggatagagcaggagggtccgg

SEQ ID NO: 20326 - DNA, 21 bp, synthetic construct
  misc_feature 1..21: note = Artificial sequence related to HLA knockouts in cell therapy
  source 1..21: mol_type = other DNA
gatagagcaggagggtccgga

SEQ ID NO: 20327 - DNA, 21 bp, synthetic construct
  misc_feature 1..21: note = Artificial sequence related to HLA knockouts in cell therapy
  source 1..21: mol_type = other DNA
atagagcaggagggtccggag

SEQ ID NO: 20328 - DNA, 21 bp, synthetic construct
  misc_feature 1..21: note = Artificial sequence related to HLA knockouts in cell therapy
  source 1..21: mol_type = other DNA
tagagcaggagggtccggagt

SEQ ID NO: 20329 - DNA, 21 bp, synthetic construct
  misc_feature 1..21: note = Artificial sequence related to HLA knockouts in cell therapy
  source 1..21: mol_type = other DNA
agagcaggagggtccggagta

SEQ ID NO: 20330 - DNA, 21 bp, synthetic construct
  misc_feature 1..21: note = Artificial sequence related to HLA knockouts in cell therapy
  source 1..21: mol_type = other DNA
gagcaggagggtccggagtat

SEQ ID NO: 20331 - DNA, 21 bp, synthetic construct
  misc_feature 1..21: note = Artificial sequence related to HLA knockouts in cell therapy
  source 1..21: mol_type = other DNA
gcaggagggtccggagtattg

SEQ ID NO: 20332 - DNA, 21 bp, synthetic construct
  misc_feature 1..21: note = Artificial sequence related to HLA knockouts in cell therapy
  source 1..21: mol_type = other DNA
caggagggtccggagtattgg

SEQ ID NO: 20333 - DNA, 21 bp, synthetic construct
  misc_feature 1..21: note = Artificial sequence related to HLA knockouts in cell therapy
  source 1..21: mol_type = other DNA
aggagggtccggagtattggg

SEQ ID NO: 20334 - DNA, 21 bp, synthetic construct
  misc_feature 1..21: note = Artificial sequence related to HLA knockouts in cell therapy
  source 1..21: mol_type = other DNA
ggagggtccggagtattggga

SEQ ID NO: 20335 - DNA, 21 bp, synthetic construct
  misc_feature 1..21: note = Artificial sequence related to HLA knockouts in cell therapy
  source 1..21: mol_type = other DNA
gagggtccggagtattgggac

SEQ ID NO: 20336 - DNA, 21 bp, synthetic construct
  misc_feature 1..21: note = Artificial sequence related to HLA knockouts in cell therapy
  source 1..21: mol_type = other DNA
agggtccggagtattgggacg

SEQ ID NO: 20337 - DNA, 21 bp, synthetic construct
  misc_feature 1..21: note = Artificial sequence related to HLA knockouts in cell therapy
  source 1..21: mol_type = other DNA
gggtccggagtattgggacgg

SEQ ID NO: 20338 - DNA, 21 bp, synthetic construct
  misc_feature 1..21: note = Artificial sequence related to HLA knockouts in cell therapy
  source 1..21: mol_type = other DNA
ggtccggagtattgggacggg

SEQ ID NO: 20339 - DNA, 21 bp, synthetic construct
  misc_feature 1..21: note = Artificial sequence related to HLA knockouts in cell therapy
  source 1..21: mol_type = other DNA
gtccggagtattgggacgggg

SEQ ID NO: 20340 - DNA, 21 bp, synthetic construct
  misc_feature 1..21: note = Artificial sequence related to HLA knockouts in cell therapy
  source 1..21: mol_type = other DNA
tccggagtattgggacgggga

SEQ ID NO: 20341 - DNA, 21 bp, synthetic construct
  misc_feature 1..21: note = Artificial sequence related to HLA knockouts in cell therapy
  source 1..21: mol_type = other DNA
ccggagtattgggacggggag

SEQ ID NO: 20342 - DNA, 21 bp, synthetic construct
  misc_feature 1..21: note = Artificial sequence related to HLA knockouts in cell therapy
  source 1..21: mol_type = other DNA
cggagtattgggacggggaga

SEQ ID NO: 20343 - DNA, 21 bp, synthetic construct
  misc_feature 1..21: note = Artificial sequence related to HLA knockouts in cell therapy
  source 1..21: mol_type = other DNA
ggagtattgggacggggagac

SEQ ID NO: 20344 - DNA, 21 bp, synthetic construct
  misc_feature 1..21: note = Artificial sequence related to HLA knockouts in cell therapy
  source 1..21: mol_type = other DNA
gtattgggacggggagacacg

SEQ ID NO: 20345 - DNA, 21 bp, synthetic construct
  misc_feature 1..21: note = Artificial sequence related to HLA knockouts in cell therapy
  source 1..21: mol_type = other DNA
tattgggacggggagacacgg

SEQ ID NO: 20346 - DNA, 21 bp, synthetic construct
  misc_feature 1..21: note = Artificial sequence related to HLA knockouts in cell therapy
  source 1..21: mol_type = other DNA
attgggacggggagacacgga

SEQ ID NO: 20347 - DNA, 21 bp, synthetic construct
  misc_feature 1..21: note = Artificial sequence related to HLA knockouts in cell therapy
  source 1..21: mol_type = other DNA
ttgggacggggagacacggaa

SEQ ID NO: 20348 - DNA, 21 bp, synthetic construct
  misc_feature 1..21: note = Artificial sequence related to HLA knockouts in cell therapy
  source 1..21: mol_type = other DNA
tgggacggggagacacggaaa

SEQ ID NO: 20349 - DNA, 21 bp, synthetic construct
  misc_feature 1..21: note = Artificial sequence related to HLA knockouts in cell therapy
  source 1..21: mol_type = other DNA
gggacggggagacacggaaag

SEQ ID NO: 20350 - DNA, 21 bp, synthetic construct
  misc_feature 1..21: note = Artificial sequence related to HLA knockouts in cell therapy
  source 1..21: mol_type = other DNA
ggacggggagacacggaaagt

SEQ ID NO: 20351 - DNA, 21 bp, synthetic construct
  misc_feature 1..21: note = Artificial sequence related to HLA knockouts in cell therapy
  source 1..21: mol_type = other DNA
gacggggagacacggaaagtg

SEQ ID NO: 20352 - DNA, 21 bp, synthetic construct
  misc_feature 1..21: note = Artificial sequence related to HLA knockouts in cell therapy
  source 1..21: mol_type = other DNA
aggcccactcacagactcacc

SEQ ID NO: 20353 - DNA, 21 bp, synthetic construct
  misc_feature 1..21: note = Artificial sequence related to HLA knockouts in cell therapy
  source 1..21: mol_type = other DNA
ggcccactcacagactcaccg

SEQ ID NO: 20354 - DNA, 21 bp, synthetic construct
  misc_feature 1..21: note = Artificial sequence related to HLA knockouts in cell therapy
  source 1..21: mol_type = other DNA
gcccactcacagactcaccga

SEQ ID NO: 20355 - DNA, 21 bp, synthetic construct
  misc_feature 1..21: note = Artificial sequence related to HLA knockouts in cell therapy
  source 1..21: mol_type = other DNA
cccactcacagactcaccgag

SEQ ID NO: 20356 - DNA, 21 bp, synthetic construct
  misc_feature 1..21: note = Artificial sequence related to HLA knockouts in cell therapy
  source 1..21: mol_type = other DNA
cacagactcaccgagtggacc

SEQ ID NO: 20357 - DNA, 21 bp, synthetic construct
  misc_feature 1..21: note = Artificial sequence related to HLA knockouts in cell therapy
  source 1..21: mol_type = other DNA
cagactcaccgagtggacctg

SEQ ID NO: 20358 - DNA, 21 bp, synthetic construct
  misc_feature 1..21: note = Artificial sequence related to HLA knockouts in cell therapy
  source 1..21: mol_type = other DNA
agactcaccgagtggacctgg

SEQ ID NO: 20359 - DNA, 21 bp, synthetic construct
  misc_feature 1..21: note = Artificial sequence related to HLA knockouts in cell therapy
  source 1..21: mol_type = other DNA
gactcaccgagtggacctggg

SEQ ID NO: 20360 - DNA, 21 bp, synthetic construct
  misc_feature 1..21: note = Artificial sequence related to HLA knockouts in cell therapy
  source 1..21: mol_type = other DNA
actcaccgagtggacctgggg

SEQ ID NO: 20361 - DNA, 21 bp, synthetic construct
  misc_feature 1..21: note = Artificial sequence related to HLA knockouts in cell therapy
  source 1..21: mol_type = other DNA
ctcaccgagtggacctgggga

SEQ ID NO: 20362 - DNA, 21 bp, synthetic construct
  misc_feature 1..21: note = Artificial sequence related to HLA knockouts in cell therapy
  source 1..21: mol_type = other DNA
tcaccgagtggacctggggac

SEQ ID NO: 20363 - DNA, 21 bp, synthetic construct
  misc_feature 1..21: note = Artificial sequence related to HLA knockouts in cell therapy
  source 1..21: mol_type = other DNA
caccgagtggacctggggacc

SEQ ID NO: 20364 - DNA, 21 bp, synthetic construct
  misc_feature 1..21: note = Artificial sequence related to HLA knockouts in cell therapy
  source 1..21: mol_type = other DNA
accgagtggacctggggaccc

SEQ ID NO: 20365 - DNA, 21 bp, synthetic construct
  misc_feature 1..21: note = Artificial sequence related to HLA knockouts in cell therapy
  source 1..21: mol_type = other DNA
ccgagtggacctggggaccct

SEQ ID NO: 20366 - DNA, 21 bp, synthetic construct
  misc_feature 1..21: note = Artificial sequence related to HLA knockouts in cell therapy
  source 1..21: mol_type = other DNA
cgagtggacctggggaccctg

SEQ ID NO: 20367 - DNA, 21 bp, synthetic construct
  misc_feature 1..21: note = Artificial sequence related to HLA knockouts in cell therapy
  source 1..21: mol_type = other DNA
gagtggacctggggaccctgc

SEQ ID NO: 20368 - DNA, 21 bp, synthetic construct
  misc_feature 1..21: note = Artificial sequence related to HLA knockouts in cell therapy
  source 1..21: mol_type = other DNA
agtggacctggggaccctgcg

SEQ ID NO: 20369 - DNA, 21 bp, synthetic construct
  misc_feature 1..21: note = Artificial sequence related to HLA knockouts in cell therapy
  source 1..21: mol_type = other DNA
gtggacctggggaccctgcgc

SEQ ID NO: 20370 - DNA, 21 bp, synthetic construct
  misc_feature 1..21: note = Artificial sequence related to HLA knockouts in cell therapy
  source 1..21: mol_type = other DNA
tggacctggggaccctgcgcg

SEQ ID NO: 20371 - DNA, 21 bp, synthetic construct
  misc_feature 1..21: note = Artificial sequence related to HLA knockouts in cell therapy
  source 1..21: mol_type = other DNA
ggacctggggaccctgcgcgg

SEQ ID NO: 20372 - DNA, 21 bp, synthetic construct
  misc_feature 1..21: note = Artificial sequence related to HLA knockouts in cell therapy
  source 1..21: mol_type = other DNA
gacctggggaccctgcgcggc

SEQ ID NO: 20373 - DNA, 21 bp, synthetic construct
  misc_feature 1..21: note = Artificial sequence related to HLA knockouts in cell therapy
  source 1..21: mol_type = other DNA
acctggggaccctgcgcggct

SEQ ID NO: 20374 - DNA, 21 bp, synthetic construct
  misc_feature 1..21: note = Artificial sequence related to HLA knockouts in cell therapy
  source 1..21: mol_type = other DNA
cctggggaccctgcgcggcta

SEQ ID NO: 20375 - DNA, 21 bp, synthetic construct
  misc_feature 1..21: note = Artificial sequence related to HLA knockouts in cell therapy
  source 1..21: mol_type = other DNA
ctggggaccctgcgcggctac

SEQ ID NO: 20376 - DNA, 21 bp, synthetic construct
  misc_feature 1..21: note = Artificial sequence related to HLA knockouts in cell therapy
  source 1..21: mol_type = other DNA
tggggaccctgcgcggctact

SEQ ID NO: 20377 - DNA, 21 bp, synthetic construct
  misc_feature 1..21: note = Artificial sequence related to HLA knockouts in cell therapy
  source 1..21: mol_type = other DNA
ggggaccctgcgcggctacta

SEQ ID NO: 20378 - DNA, 21 bp, synthetic construct
  misc_feature 1..21: note = Artificial sequence related to HLA knockouts in cell therapy
  source 1..21: mol_type = other DNA
gggaccctgcgcggctactac

SEQ ID NO: 20379 - DNA, 21 bp, synthetic construct
  misc_feature 1..21: note = Artificial sequence related to HLA knockouts in cell therapy
  source 1..21: mol_type = other DNA
ggaccctgcgcggctactaca

SEQ ID NO: 20380 - DNA, 21 bp, synthetic construct
  misc_feature 1..21: note = Artificial sequence related to HLA knockouts in cell therapy
  source 1..21: mol_type = other DNA
gaccctgcgcggctactacaa

SEQ ID NO: 20381 - DNA, 21 bp, synthetic construct
  misc_feature 1..21: note = Artificial sequence related to HLA knockouts in cell therapy
  source 1..21: mol_type = other DNA
accctgcgcggctactacaac

SEQ ID NO: 20382 - DNA, 21 bp, synthetic construct
  misc_feature 1..21: note = Artificial sequence related to HLA knockouts in cell therapy
  source 1..21: mol_type = other DNA
ccctgcgcggctactacaacc

SEQ ID NO: 20383 - DNA, 21 bp, synthetic construct
  misc_feature 1..21: note = Artificial sequence related to HLA knockouts in cell therapy
  source 1..21: mol_type = other DNA
cctgcgcggctactacaacca

SEQ ID NO: 20384 - DNA, 21 bp, synthetic construct
  misc_feature 1..21: note = Artificial sequence related to HLA knockouts in cell therapy
  source 1..21: mol_type = other DNA
ctgcgcggctactacaaccag

SEQ ID NO: 20385 - DNA, 21 bp, synthetic construct
  misc_feature 1..21: note = Artificial sequence related to HLA knockouts in cell therapy
  source 1..21: mol_type = other DNA
gcgcggctactacaaccagag

SEQ ID NO: 20386 - DNA, 21 bp, synthetic construct
  misc_feature 1..21: note = Artificial sequence related to HLA knockouts in cell therapy
  source 1..21: mol_type = other DNA
cgcggctactacaaccagagc

SEQ ID NO: 20387 - DNA, 21 bp, synthetic construct
  misc_feature 1..21: note = Artificial sequence related to HLA knockouts in cell therapy
  source 1..21: mol_type = other DNA
gcggctactacaaccagagcg

SEQ ID NO: 20388 - DNA, 21 bp, synthetic construct
  misc_feature 1..21: note = Artificial sequence related to HLA knockouts in cell therapy
  source 1..21: mol_type = other DNA
actacaaccagagcgaggccg

SEQ ID NO: 20389 - DNA, 21 bp, synthetic construct
  misc_feature 1..21: note = Artificial sequence related to HLA knockouts in cell therapy
  source 1..21: mol_type = other DNA
ctacaaccagagcgaggccgg

SEQ ID NO: 20390 - DNA, 21 bp, synthetic construct
  misc_feature 1..21: note = Artificial sequence related to HLA knockouts in cell therapy
  source 1..21: mol_type = other DNA
tacaaccagagcgaggccggt

SEQ ID NO: 20391 - DNA, 21 bp, synthetic construct
  misc_feature 1..21: note = Artificial sequence related to HLA knockouts in cell therapy
  source 1..21: mol_type = other DNA
acaaccagagcgaggccggtt

SEQ ID NO: 20392 - DNA, 21 bp, synthetic construct
  misc_feature 1..21: note = Artificial sequence related to HLA knockouts in cell therapy
  source 1..21: mol_type = other DNA
caaccagagcgaggccggttc

SEQ ID NO: 20393 - DNA, 21 bp, synthetic construct
  misc_feature 1..21: note = Artificial sequence related to HLA knockouts in cell therapy
  source 1..21: mol_type = other DNA
aaccagagcgaggccggttct

SEQ ID NO: 20394 - DNA, 21 bp, synthetic construct
  misc_feature 1..21: note = Artificial sequence related to HLA knockouts in cell therapy
  source 1..21: mol_type = other DNA
accagagcgaggccggttctc

SEQ ID NO: 20395 - DNA, 21 bp, synthetic construct
  misc_feature 1..21: note = Artificial sequence related to HLA knockouts in cell therapy
  source 1..21: mol_type = other DNA
ccagagcgaggccggttctca

SEQ ID NO: 20396 - DNA, 21 bp, synthetic construct
  misc_feature 1..21: note = Artificial sequence related to HLA knockouts in cell therapy
  source 1..21: mol_type = other DNA
cagagcgaggccggttctcac

SEQ ID NO: 20397 - DNA, 21 bp, synthetic construct
  misc_feature 1..21: note = Artificial sequence related to HLA knockouts in cell therapy
  source 1..21: mol_type = other DNA
agagcgaggccggttctcaca

SEQ ID NO: 20398 - DNA, 21 bp, synthetic construct
  misc_feature 1..21: note = Artificial sequence related to HLA knockouts in cell therapy
  source 1..21: mol_type = other DNA
gagcgaggccggttctcacac

SEQ ID NO: 20399 - DNA, 21 bp, synthetic construct
  misc_feature 1..21: note = Artificial sequence related to HLA knockouts in cell therapy
  source 1..21: mol_type = other DNA
agcgaggccggttctcacacc

SEQ ID NO: 20400 - DNA, 21 bp, synthetic construct
  misc_feature 1..21: note = Artificial sequence related to HLA knockouts in cell therapy
  source 1..21: mol_type = other DNA
gcgaggccggttctcacaccg

SEQ ID NO: 20401 - DNA, 21 bp, synthetic construct
  misc_feature 1..21: note = Artificial sequence related to HLA knockouts in cell therapy
  source 1..21: mol_type = other DNA
cgaggccggttctcacaccgt

SEQ ID NO: 20402 - DNA, 21 bp, synthetic construct
  misc_feature 1..21: note = Artificial sequence related to HLA knockouts in cell therapy
  source 1..21: mol_type = other DNA
gaggccggttctcacaccgtc

SEQ ID NO: 20403 - DNA, 21 bp, synthetic construct
  misc_feature 1..21: note = Artificial sequence related to HLA knockouts in cell therapy
  source 1..21: mol_type = other DNA
aggccggttctcacaccgtcc

SEQ ID NO: 20404 - DNA, 21 bp, synthetic construct
  misc_feature 1..21: note = Artificial sequence related to HLA knockouts in cell therapy
  source 1..21: mol_type = other DNA
ggccggttctcacaccgtcca

SEQ ID NO: 20405 - DNA, 21 bp, synthetic construct
  misc_feature 1..21: note = Artificial sequence related to HLA knockouts in cell therapy
  source 1..21: mol_type = other DNA
gccggttctcacaccgtccag

SEQ ID NO: 20406 - DNA, 21 bp, synthetic construct
  misc_feature 1..21: note = Artificial sequence related to HLA knockouts in cell therapy
  source 1..21: mol_type = other DNA
ccggttctcacaccgtccaga

SEQ ID NO: 20407 - DNA, 21 bp, synthetic construct
  misc_feature 1..21: note = Artificial sequence related to HLA knockouts in cell therapy
  source 1..21: mol_type = other DNA
cggttctcacaccgtccagag

SEQ ID NO: 20408 - DNA, 21 bp, synthetic construct
  misc_feature 1..21: note = Artificial sequence related to HLA knockouts in cell therapy
  source 1..21: mol_type = other DNA
ggttctcacaccgtccagagg

SEQ ID NO: 20409 - DNA, 21 bp, synthetic construct
  misc_feature 1..21: note = Artificial sequence related to HLA knockouts in cell therapy
  source 1..21: mol_type = other DNA
ggatgtatggctgcgacgtgg

SEQ ID NO: 20410 - DNA, 21 bp, synthetic construct
  misc_feature 1..21: note = Artificial sequence related to HLA knockouts in cell therapy
  source 1..21: mol_type = other DNA
gatgtatggctgcgacgtggg

SEQ ID NO: 20411 - DNA, 21 bp, synthetic construct
  misc_feature 1..21: note = Artificial sequence related to HLA knockouts in cell therapy
  source 1..21: mol_type = other DNA
atgtatggctgcgacgtgggg

SEQ ID NO: 20412 - DNA, 21 bp, synthetic construct
  misc_feature 1..21: note = Artificial sequence related to HLA knockouts in cell therapy
  source 1..21: mol_type = other DNA
tgtatggctgcgacgtggggt

SEQ ID NO: 20413 - DNA, 21 bp, synthetic construct
  misc_feature 1..21: note = Artificial sequence related to HLA knockouts in cell therapy
  source 1..21: mol_type = other DNA
gtatggctgcgacgtggggtc

SEQ ID NO: 20414 - DNA, 21 bp, synthetic construct
  misc_feature 1..21: note = Artificial sequence related to HLA knockouts in cell therapy
  source 1..21: mol_type = other DNA
tatggctgcgacgtggggtcg

SEQ ID NO: 20415 - DNA, 21 bp, synthetic construct
  misc_feature 1..21: note = Artificial sequence related to HLA knockouts in cell therapy
  source 1..21: mol_type = other DNA
atggctgcgacgtggggtcgg

SEQ ID NO: 20416 - DNA, 21 bp, synthetic construct
  misc_feature 1..21: note = Artificial sequence related to HLA knockouts in cell therapy
  source 1..21: mol_type = other DNA
tggctgcgacgtggggtcgga

SEQ ID NO: 20417 - DNA, 21 bp, synthetic construct
  misc_feature 1..21: note = Artificial sequence related to HLA knockouts in cell therapy
  source 1..21: mol_type = other DNA
ggctgcgacgtggggtcggac

SEQ ID NO: 20418 - DNA, 21 bp, synthetic construct
  misc_feature 1..21: note = Artificial sequence related to HLA knockouts in cell therapy
  source 1..21: mol_type = other DNA
gctgcgacgtggggtcggact

SEQ ID NO: 20419 - DNA, 21 bp, synthetic construct
  misc_feature 1..21: note = Artificial sequence related to HLA knockouts in cell therapy
  source 1..21: mol_type = other DNA
ctgcgacgtggggtcggactg

SEQ ID NO: 20420 - DNA, 21 bp, synthetic construct
  misc_feature 1..21: note = Artificial sequence related to HLA knockouts in cell therapy
  source 1..21: mol_type = other DNA
tgcgacgtggggtcggactgg

SEQ ID NO: 20421 - DNA, 21 bp, synthetic construct
  misc_feature 1..21: note = Artificial sequence related to HLA knockouts in cell therapy
  source 1..21: mol_type = other DNA
gcgacgtggggtcggactggc

SEQ ID NO: 20422 - DNA, 21 bp, synthetic construct
  misc_feature 1..21: note = Artificial sequence related to HLA knockouts in cell therapy
  source 1..21: mol_type = other DNA
cgacgtggggtcggactggcg

SEQ ID NO: 20423 - DNA, 21 bp, synthetic construct
  misc_feature 1..21: note = Artificial sequence related to HLA knockouts in cell therapy
  source 1..21: mol_type = other DNA
gacgtggggtcggactggcgc

SEQ ID NO: 20424 - DNA, 21 bp, synthetic construct
  misc_feature 1..21: note = Artificial sequence related to HLA knockouts in cell therapy
  source 1..21: mol_type = other DNA
acgtggggtcggactggcgct

SEQ ID NO: 20425 - DNA, 21 bp, synthetic construct
  misc_feature 1..21: note = Artificial sequence related to HLA knockouts in cell therapy
  source 1..21: mol_type = other DNA
cgtggggtcggactggcgctt

SEQ ID NO: 20426 - DNA, 21 bp, synthetic construct
  misc_feature 1..21: note = Artificial sequence related to HLA knockouts in cell therapy
  source 1..21: mol_type = other DNA
gtggggtcggactggcgcttc

SEQ ID NO: 20427 - DNA, 21 bp, synthetic construct
  misc_feature 1..21: note = Artificial sequence related to HLA knockouts in cell therapy
  source 1..21: mol_type = other DNA
tggggtcggactggcgcttcc

SEQ ID NO: 20428 - DNA, 21 bp, synthetic construct
  misc_feature 1..21: note = Artificial sequence related to HLA knockouts in cell therapy
  source 1..21: mol_type = other DNA
ggggtcggactggcgcttcct

SEQ ID NO: 20429 - DNA, 21 bp, synthetic construct
  misc_feature 1..21: note = Artificial sequence related to HLA knockouts in cell therapy
  source 1..21: mol_type = other DNA
gggtcggactggcgcttcctc

SEQ ID NO: 20430 - DNA, 21 bp, synthetic construct
  misc_feature 1..21: note = Artificial sequence related to HLA knockouts in cell therapy
  source 1..21: mol_type = other DNA
ggtcggactggcgcttcctcc

SEQ ID NO: 20431 - DNA, 21 bp, synthetic construct
  misc_feature 1..21: note = Artificial sequence related to HLA knockouts in cell therapy
  source 1..21: mol_type = other DNA
gtcggactggcgcttcctccg

SEQ ID NO: 20432 - DNA, 21 bp, synthetic construct
  misc_feature 1..21: note = Artificial sequence related to HLA knockouts in cell therapy
  source 1..21: mol_type = other DNA
tcggactggcgcttcctccgc

SEQ ID NO: 20433 - DNA, 21 bp, synthetic construct
  misc_feature 1..21: note = Artificial sequence related to HLA knockouts in cell therapy
  source 1..21: mol_type = other DNA
cggactggcgcttcctccgcg

SEQ ID NO: 20434 - DNA, 21 bp, synthetic construct
  misc_feature 1..21: note = Artificial sequence related to HLA knockouts in cell therapy
  source 1..21: mol_type = other DNA
ggactggcgcttcctccgcgg

SEQ ID NO: 20435 - DNA, 21 bp, synthetic construct
  misc_feature 1..21: note = Artificial sequence related to HLA knockouts in cell therapy
  source 1..21: mol_type = other DNA
gactggcgcttcctccgcggg

SEQ ID NO: 20436 - DNA, 21 bp, synthetic construct
  misc_feature 1..21: note = Artificial sequence related to HLA knockouts in cell therapy
  source 1..21: mol_type = other DNA
actggcgcttcctccgcgggt

SEQ ID NO: 20437 - DNA, 21 bp, synthetic construct
  misc_feature 1..21: note = Artificial sequence related to HLA knockouts in cell therapy
  source 1..21: mol_type = other DNA
ctggcgcttcctccgcgggta

SEQ ID NO: 20438 - DNA, 21 bp, synthetic construct
  misc_feature 1..21: note = Artificial sequence related to HLA knockouts in cell therapy
  source 1..21: mol_type = other DNA
tggcgcttcctccgcgggtac

SEQ ID NO: 20439 - DNA, 21 bp, synthetic construct
  misc_feature 1..21: note = Artificial sequence related to HLA knockouts in cell therapy
  source 1..21: mol_type = other DNA
ggcgcttcctccgcgggtacc

SEQ ID NO: 20440 - DNA, 21 bp, synthetic construct
  misc_feature 1..21: note = Artificial sequence related to HLA knockouts in cell therapy
  source 1..21: mol_type = other DNA
gcgcttcctccgcgggtacca

SEQ ID NO: 20441 - DNA, 21 bp, synthetic construct
  misc_feature 1..21: note = Artificial sequence related to HLA knockouts in cell therapy
  source 1..21: mol_type = other DNA
cgcttcctccgcgggtaccac

SEQ ID NO: 20442 - DNA, 21 bp, synthetic construct
  misc_feature 1..21: note = Artificial sequence related to HLA knockouts in cell therapy
  source 1..21: mol_type = other DNA
gcttcctccgcgggtaccacc

SEQ ID NO: 20443 - DNA, 21 bp, synthetic construct
  misc_feature 1..21: note = Artificial sequence related to HLA knockouts in cell therapy
  source 1..21: mol_type = other DNA
cttcctccgcgggtaccacca

SEQ ID NO: 20444 - DNA, 21 bp, synthetic construct
  misc_feature 1..21: note = Artificial sequence related to HLA knockouts in cell therapy
  source 1..21: mol_type = other DNA
ttcctccgcgggtaccaccag

SEQ ID NO: 20445 - DNA, 21 bp, synthetic construct
  misc_feature 1..21: note = Artificial sequence related to HLA knockouts in cell therapy
  source 1..21: mol_type = other DNA
tcctccgcgggtaccaccagt

SEQ ID NO: 20446 - DNA, 21 bp, synthetic construct
  misc_feature 1..21: note = Artificial sequence related to HLA knockouts in cell therapy
  source 1..21: mol_type = other DNA
cctccgcgggtaccaccagta

SEQ ID NO: 20447 - DNA, 21 bp, synthetic construct
  misc_feature 1..21: note = Artificial sequence related to HLA knockouts in cell therapy
  source 1..21: mol_type = other DNA
ctccgcgggtaccaccagtac

SEQ ID NO: 20448 - DNA, 21 bp, synthetic construct
  misc_feature 1..21: note = Artificial sequence related to HLA knockouts in cell therapy
  source 1..21: mol_type = other DNA
tccgcgggtaccaccagtacg

SEQ ID NO: 20449 - DNA, 21 bp, synthetic construct
  misc_feature 1..21: note = Artificial sequence related to HLA knockouts in cell therapy
  source 1..21: mol_type = other DNA
ccgcgggtaccaccagtacgc

SEQ ID NO: 20450 - DNA, 21 bp, synthetic construct
  misc_feature 1..21: note = Artificial sequence related to HLA knockouts in cell therapy
  source 1..21: mol_type = other DNA
cgcgggtaccaccagtacgcc

SEQ ID NO: 20451 - DNA, 21 bp, synthetic construct
  misc_feature 1..21: note = Artificial sequence related to HLA knockouts in cell therapy
  source 1..21: mol_type = other DNA
gcgggtaccaccagtacgcct

SEQ ID NO: 20452 - DNA, 21 bp, synthetic construct
  misc_feature 1..21: note = Artificial sequence related to HLA knockouts in cell therapy
  source 1..21: mol_type = other DNA
cgggtaccaccagtacgccta

SEQ ID NO: 20453 - DNA, 21 bp, synthetic construct
  misc_feature 1..21: note = Artificial sequence related to HLA knockouts in cell therapy
  source 1..21: mol_type = other DNA
gggtaccaccagtacgcctac

SEQ ID NO: 20454 - DNA, 21 bp, synthetic construct
  misc_feature 1..21: note = Artificial sequence related to HLA knockouts in cell therapy
  source 1..21: mol_type = other DNA
ggtaccaccagtacgcctacg

SEQ ID NO: 20455 - DNA, 21 bp, synthetic construct
  misc_feature 1..21: note = Artificial sequence related to HLA knockouts in cell therapy
  source 1..21: mol_type = other DNA
accaccagtacgcctacgacg

SEQ ID NO: 20456 - DNA, 21 bp, synthetic construct
  misc_feature 1..21: note = Artificial sequence related to HLA knockouts in cell therapy
  source 1..21: mol_type = other DNA
ccaccagtacgcctacgacgg

SEQ ID NO: 20457 - DNA, 21 bp, synthetic construct
  misc_feature 1..21: note = Artificial sequence related to HLA knockouts in cell therapy
  source 1..21: mol_type = other DNA
caccagtacgcctacgacggc

SEQ ID NO: 20458 - DNA, 21 bp, synthetic construct
  misc_feature 1..21: note = Artificial sequence related to HLA knockouts in cell therapy
  source 1..21: mol_type = other DNA
accagtacgcctacgacggca

SEQ ID NO: 20459 - DNA, 21 bp, synthetic construct
  misc_feature 1..21: note = Artificial sequence related to HLA knockouts in cell therapy
  source 1..21: mol_type = other DNA
ccagtacgcctacgacggcaa

SEQ ID NO: 20460 - DNA, 21 bp, synthetic construct
  misc_feature 1..21: note = Artificial sequence related to HLA knockouts in cell therapy
  source 1..21: mol_type = other DNA
cagtacgcctacgacggcaag

SEQ ID NO: 20461 - DNA, 21 bp, synthetic construct
  misc_feature 1..21: note = Artificial sequence related to HLA knockouts in cell therapy
  source 1..21: mol_type = other DNA
agtacgcctacgacggcaagg

SEQ ID NO: 20462 - DNA, 21 bp, synthetic construct
  misc_feature 1..21: note = Artificial sequence related to HLA knockouts in cell therapy
  source 1..21: mol_type = other DNA
gtacgcctacgacggcaagga

SEQ ID NO: 20463 - DNA, 21 bp, synthetic construct
  misc_feature 1..21: note = Artificial sequence related to HLA knockouts in cell therapy
  source 1..21: mol_type = other DNA
tcgccctgaaagaggacctgc

SEQ ID NO: 20464 - DNA, 21 bp, synthetic construct
  misc_feature 1..21: note = Artificial sequence related to HLA knockouts in cell therapy
  source 1..21: mol_type = other DNA
cgccctgaaagaggacctgcg

SEQ ID NO: 20465 - DNA, 21 bp, synthetic construct
  misc_feature 1..21: note = Artificial sequence related to HLA knockouts in cell therapy
  source 1..21: mol_type = other DNA
gccctgaaagaggacctgcgc

SEQ ID NO: 20466 - DNA, 21 bp, synthetic construct
  misc_feature 1..21: note = Artificial sequence related to HLA knockouts in cell therapy
  source 1..21: mol_type = other DNA
ccctgaaagaggacctgcgct

SEQ ID NO: 20467 - DNA, 21 bp, synthetic construct
  misc_feature 1..21: note = Artificial sequence related to HLA knockouts in cell therapy
  source 1..21: mol_type = other DNA
cctgaaagaggacctgcgctc

SEQ ID NO: 20468 - DNA, 21 bp, synthetic construct
  misc_feature 1..21: note = Artificial sequence related to HLA knockouts in cell therapy
  source 1..21: mol_type = other DNA
agaggacctgcgctcttggac

SEQ ID NO: 20469 - DNA, 21 bp, synthetic construct
  misc_feature 1..21: note = Artificial sequence related to HLA knockouts in cell therapy
  source 1..21: mol_type = other DNA
gaggacctgcgctcttggacc

SEQ ID NO: 20470 - DNA, 21 bp, synthetic construct
  misc_feature 1..21: note = Artificial sequence related to HLA knockouts in cell therapy
  source 1..21: mol_type = other DNA
aggacctgcgctcttggaccg

SEQ ID NO: 20471 - DNA, 21 bp, synthetic construct
  misc_feature 1..21: note = Artificial sequence related to HLA knockouts in cell therapy
  source 1..21: mol_type = other DNA
ggacctgcgctcttggaccgc

SEQ ID NO: 20472 - DNA, 21 bp, synthetic construct
  misc_feature 1..21: note = Artificial sequence related to HLA knockouts in cell therapy
  source 1..21: mol_type = other DNA
gacctgcgctcttggaccgcg

SEQ ID NO: 20473 - DNA, 21 bp, synthetic construct
  misc_feature 1..21: note = Artificial sequence related to HLA knockouts in cell therapy
  source 1..21: mol_type = other DNA
acctgcgctcttggaccgcgg

SEQ ID NO: 20474 - DNA, 21 bp, synthetic construct
  misc_feature 1..21: note = Artificial sequence related to HLA knockouts in cell therapy
  source 1..21: mol_type = other DNA
cctgcgctcttggaccgcggc

SEQ ID NO: 20475 - DNA, 21 bp, synthetic construct
  misc_feature 1..21: note = Artificial sequence related to HLA knockouts in cell therapy
  source 1..21: mol_type = other DNA
ctgcgctcttggaccgcggcg

SEQ ID NO: 20476 - DNA, 21 bp, synthetic construct
  misc_feature 1..21: note = Artificial sequence related to HLA knockouts in cell therapy
  source 1..21: mol_type = other DNA
tgcgctcttggaccgcggcgg

SEQ ID NO: 20477 - DNA, 21 bp, synthetic construct
  misc_feature 1..21: note = Artificial sequence related to HLA knockouts in cell therapy
  source 1..21: mol_type = other DNA
gcgctcttggaccgcggcgga

SEQ ID NO: 20478 - DNA, 21 bp, synthetic construct
  misc_feature 1..21: note = Artificial sequence related to HLA knockouts in cell therapy
  source 1..21: mol_type = other DNA
cgctcttggaccgcggcggac

SEQ ID NO: 20479 - DNA, 21 bp, synthetic construct
  misc_feature 1..21: note = Artificial sequence related to HLA knockouts in cell therapy
  source 1..21: mol_type = other DNA
gctcttggaccgcggcggaca

SEQ ID NO: 20480 - DNA, 21 bp, synthetic construct
  misc_feature 1..21: note = Artificial sequence related to HLA knockouts in cell therapy
  source 1..21: mol_type = other DNA
ctcttggaccgcggcggacat

SEQ ID NO: 20481 - DNA, 21 bp, synthetic construct
  misc_feature 1..21: note = Artificial sequence related to HLA knockouts in cell therapy
  source 1..21: mol_type = other DNA
tcttggaccgcggcggacatg

SEQ ID NO: 20482 - DNA, 21 bp, synthetic construct
  misc_feature 1..21: note = Artificial sequence related to HLA knockouts in cell therapy
  source 1..21: mol_type = other DNA
cttggaccgcggcggacatgg

SEQ ID NO: 20483 - DNA, 21 bp, synthetic construct
  misc_feature 1..21: note = Artificial sequence related to HLA knockouts in cell therapy
  source 1..21: mol_type = other DNA
ttggaccgcggcggacatggc

SEQ ID NO: 20484 - DNA, 21 bp, synthetic construct
  misc_feature 1..21: note = Artificial sequence related to HLA knockouts in cell therapy
  source 1..21: mol_type = other DNA
tggaccgcggcggacatggca

SEQ ID NO: 20485 - DNA, 21 bp, synthetic construct
  misc_feature 1..21: note = Artificial sequence related to HLA knockouts in cell therapy
  source 1..21: mol_type = other DNA
ggaccgcggcggacatggcag

SEQ ID NO: 20486 - DNA, 21 bp, synthetic construct
  misc_feature 1..21: note = Artificial sequence related to HLA knockouts in cell therapy
  source 1..21: mol_type = other DNA
gaccgcggcggacatggcagc

SEQ ID NO: 20487 - DNA, 21 bp, synthetic construct
  misc_feature 1..21: note = Artificial sequence related to HLA knockouts in cell therapy
  source 1..21: mol_type = other DNA
accgcggcggacatggcagct

SEQ ID NO: 20488 - DNA, 21 bp, synthetic construct
  misc_feature 1..21: note = Artificial sequence related to HLA knockouts in cell therapy
  source 1..21: mol_type = other DNA
ccgcggcggacatggcagctc

SEQ ID NO: 20489 - DNA, 21 bp, synthetic construct
  misc_feature 1..21: note = Artificial sequence related to HLA knockouts in cell therapy
  source 1..21: mol_type = other DNA
cgcggcggacatggcagctca

SEQ ID NO: 20490 - DNA, 21 bp, synthetic construct
  misc_feature 1..21: note = Artificial sequence related to HLA knockouts in cell therapy
  source 1..21: mol_type = other DNA
gcggcggacatggcagctcag

SEQ ID NO: 20491 - DNA, 21 bp, synthetic construct
  misc_feature 1..21: note = Artificial sequence related to HLA knockouts in cell therapy
  source 1..21: mol_type = other DNA
cggcggacatggcagctcaga

SEQ ID NO: 20492 - DNA, 21 bp, synthetic construct
  misc_feature 1..21: note = Artificial sequence related to HLA knockouts in cell therapy
  source 1..21: mol_type = other DNA
ggcggacatggcagctcagac

SEQ ID NO: 20493 - DNA, 21 bp, synthetic construct
  misc_feature 1..21: note = Artificial sequence related to HLA knockouts in cell therapy
  source 1..21: mol_type = other DNA
gcggacatggcagctcagacc

SEQ ID NO: 20494 - DNA, 21 bp, synthetic construct
  misc_feature 1..21: note = Artificial sequence related to HLA knockouts in cell therapy
  source 1..21: mol_type = other DNA
cggacatggcagctcagacca

SEQ ID NO: 20495 - DNA, 21 bp, synthetic construct
  misc_feature 1..21: note = Artificial sequence related to HLA knockouts in cell therapy
  source 1..21: mol_type = other DNA
ggacatggcagctcagaccac

SEQ ID NO: 20496 - DNA, 21 bp, synthetic construct
  misc_feature 1..21: note = Artificial sequence related to HLA knockouts in cell therapy
  source 1..21: mol_type = other DNA
gacatggcagctcagaccacc

SEQ ID NO: 20497 - DNA, 21 bp, synthetic construct
  misc_feature 1..21: note = Artificial sequence related to HLA knockouts in cell therapy
  source 1..21: mol_type = other DNA
tggcagctcagaccaccaagc

SEQ ID NO: 20498 - DNA, 21 bp, synthetic construct
  misc_feature 1..21: note = Artificial sequence related to HLA knockouts in cell therapy
  source 1..21: mol_type = other DNA
ggcagctcagaccaccaagca

SEQ ID NO: 20499 - DNA, 21 bp, synthetic construct
  misc_feature 1..21: note = Artificial sequence related to HLA knockouts in cell therapy
  source 1..21: mol_type = other DNA
gcagctcagaccaccaagcac

SEQ ID NO: 20500 - DNA, 21 bp, synthetic construct
  misc_feature 1..21: note = Artificial sequence related to HLA knockouts in cell therapy
  source 1..21: mol_type = other DNA
ccaccaagcacaagtgggagg

SEQ ID NO: 20501 - DNA, 21 bp, synthetic construct
  misc_feature 1..21: note = Artificial sequence related to HLA knockouts in cell therapy
  source 1..21: mol_type = other DNA
caccaagcacaagtgggaggc

SEQ ID NO: 20502 - DNA, 21 bp, synthetic construct
  misc_feature 1..21: note = Artificial sequence related to HLA knockouts in cell therapy
  source 1..21: mol_type = other DNA
accaagcacaagtgggaggcg

SEQ ID NO: 20503 - DNA, 21 bp, synthetic construct
  misc_feature 1..21: note = Artificial sequence related to HLA knockouts in cell therapy
  source 1..21: mol_type = other DNA
ccaagcacaagtgggaggcgg

SEQ ID NO: 20504 - DNA, 21 bp, synthetic construct
  misc_feature 1..21: note = Artificial sequence related to HLA knockouts in cell therapy
  source 1..21: mol_type = other DNA
caagcacaagtgggaggcggc

SEQ ID NO: 20505 - DNA, 21 bp, synthetic construct
  misc_feature 1..21: note = Artificial sequence related to HLA knockouts in cell therapy
  source 1..21: mol_type = other DNA
aagcacaagtgggaggcggcc

SEQ ID NO: 20506 - DNA, 21 bp, synthetic construct
  misc_feature 1..21: note = Artificial sequence related to HLA knockouts in cell therapy
  source 1..21: mol_type = other DNA
agcacaagtgggaggcggccc

SEQ ID NO: 20507 - DNA, 21 bp, synthetic construct
  misc_feature 1..21: note = Artificial sequence related to HLA knockouts in cell therapy
  source 1..21: mol_type = other DNA
gcacaagtgggaggcggccca

SEQ ID NO: 20508 - DNA, 21 bp, synthetic construct
  misc_feature 1..21: note = Artificial sequence related to HLA knockouts in cell therapy
  source 1..21: mol_type = other DNA
cacaagtgggaggcggcccat

SEQ ID NO: 20509 - DNA, 21 bp, synthetic construct
  misc_feature 1..21: note = Artificial sequence related to HLA knockouts in cell therapy
  source 1..21: mol_type = other DNA
acaagtgggaggcggcccatg

SEQ ID NO: 20510 - DNA, 21 bp, synthetic construct
  misc_feature 1..21: note = Artificial sequence related to HLA knockouts in cell therapy
  source 1..21: mol_type = other DNA
caagtgggaggcggcccatgt

SEQ ID NO: 20511 - DNA, 21 bp, synthetic construct
  misc_feature 1..21: note = Artificial sequence related to HLA knockouts in cell therapy
  source 1..21: mol_type = other DNA
aagtgggaggcggcccatgtg

SEQ ID NO: 20512 - DNA, 21 bp, synthetic construct
  misc_feature 1..21: note = Artificial sequence related to HLA knockouts in cell therapy
  source 1..21: mol_type = other DNA
agtgggaggcggcccatgtgg

SEQ ID NO: 20513 - DNA, 21 bp, synthetic construct
  misc_feature 1..21: note = Artificial sequence related to HLA knockouts in cell therapy
  source 1..21: mol_type = other DNA
gtgggaggcggcccatgtggc

SEQ ID NO: 20514 - DNA, 21 bp, synthetic construct
  misc_feature 1..21: note = Artificial sequence related to HLA knockouts in cell therapy
  source 1..21: mol_type = other DNA
tgggaggcggcccatgtggcg

SEQ ID NO: 20515 - DNA, 21 bp, synthetic construct
  misc_feature 1..21: note = Artificial sequence related to HLA knockouts in cell therapy
  source 1..21: mol_type = other DNA
gggaggcggcccatgtggcgg

SEQ ID NO: 20516 - DNA, 21 bp, synthetic construct
  misc_feature 1..21: note = Artificial sequence related to HLA knockouts in cell therapy
  source 1..21: mol_type = other DNA
ggaggcggcccatgtggcgga

SEQ ID NO: 20517 - DNA, 21 bp, synthetic construct
  misc_feature 1..21: note = Artificial sequence related to HLA knockouts in cell therapy
  source 1..21: mol_type = other DNA
gaggcggcccatgtggcggag

SEQ ID NO: 20518 - DNA, 21 bp, synthetic construct
  misc_feature 1..21: note = Artificial sequence related to HLA knockouts in cell therapy
  source 1..21: mol_type = other DNA
aggcggcccatgtggcggagc

SEQ ID NO: 20519 - DNA, 21 bp, synthetic construct
  misc_feature 1..21: note = Artificial sequence related to HLA knockouts in cell therapy
  source 1..21: mol_type = other DNA
ggcggcccatgtggcggagca

SEQ ID NO: 20520 - DNA, 21 bp, synthetic construct
  misc_feature 1..21: note = Artificial sequence related to HLA knockouts in cell therapy
  source 1..21: mol_type = other DNA
gcggcccatgtggcggagcag

SEQ ID NO: 20521 - DNA, 21 bp, synthetic construct
  misc_feature 1..21: note = Artificial sequence related to HLA knockouts in cell therapy
  source 1..21: mol_type = other DNA
cggcccatgtggcggagcagt

SEQ ID NO: 20522 - DNA, 21 bp, synthetic construct
  misc_feature 1..21: note = Artificial sequence related to HLA knockouts in cell therapy
  source 1..21: mol_type = other DNA
ggcccatgtggcggagcagtt

SEQ ID NO: 20523 - DNA, 21 bp, synthetic construct
  misc_feature 1..21: note = Artificial sequence related to HLA knockouts in cell therapy
  source 1..21: mol_type = other DNA
gcccatgtggcggagcagttg

SEQ ID NO: 20524 - DNA, 21 bp, synthetic construct
  misc_feature 1..21: note = Artificial sequence related to HLA knockouts in cell therapy
  source 1..21: mol_type = other DNA
cccatgtggcggagcagttga

SEQ ID NO: 20525 - DNA, 21 bp, synthetic construct
  misc_feature 1..21: note = Artificial sequence related to HLA knockouts in cell therapy
  source 1..21: mol_type = other DNA
ccatgtggcggagcagttgag

SEQ ID NO: 20526 - DNA, 21 bp, synthetic construct
  misc_feature 1..21: note = Artificial sequence related to HLA knockouts in cell therapy
  source 1..21: mol_type = other DNA
tgtggcggagcagttgagagc

SEQ ID NO: 20527 - DNA, 21 bp, synthetic construct
  misc_feature 1..21: note = Artificial sequence related to HLA knockouts in cell therapy
  source 1..21: mol_type = other DNA
gtggcggagcagttgagagcc

SEQ ID NO: 20528 - DNA, 21 bp, synthetic construct
  misc_feature 1..21: note = Artificial sequence related to HLA knockouts in cell therapy
  source 1..21: mol_type = other DNA
tggcggagcagttgagagcct

SEQ ID NO: 20529 - DNA, 21 bp, synthetic construct
  misc_feature 1..21: note = Artificial sequence related to HLA knockouts in cell therapy
  source 1..21: mol_type = other DNA
ggcggagcagttgagagccta

SEQ ID NO: 20530 - DNA, 21 bp, synthetic construct
  misc_feature 1..21: note = Artificial sequence related to HLA knockouts in cell therapy
  source 1..21: mol_type = other DNA
gcggagcagttgagagcctac

SEQ ID NO: 20531 - DNA, 21 bp, synthetic construct
  misc_feature 1..21: note = Artificial sequence related to HLA knockouts in cell therapy
  source 1..21: mol_type = other DNA
cggagcagttgagagcctacc

SEQ ID NO: 20532 - DNA, 21 bp, synthetic construct
  misc_feature 1..21: note = Artificial sequence related to HLA knockouts in cell therapy
  source 1..21: mol_type = other DNA
gttgagagcctacctggaggg

SEQ ID NO: 20533 - DNA, 21 bp, synthetic construct
  misc_feature 1..21: note = Artificial sequence related to HLA knockouts in cell therapy
  source 1..21: mol_type = other DNA
ttgagagcctacctggagggc

SEQ ID NO: 20534 - DNA, 21 bp, synthetic construct
  misc_feature 1..21: note = Artificial sequence related to HLA knockouts in cell therapy
  source 1..21: mol_type = other DNA
tgagagcctacctggagggca

SEQ ID NO: 20535 - DNA, 21 bp, synthetic construct
  misc_feature 1..21: note = Artificial sequence related to HLA knockouts in cell therapy
  source 1..21: mol_type = other DNA
gagagcctacctggagggcac

SEQ ID NO: 20536 - DNA, 21 bp, synthetic construct
  misc_feature 1..21: note = Artificial sequence related to HLA knockouts in cell therapy
  source 1..21: mol_type = other DNA
agagcctacctggagggcacg

SEQ ID NO: 20537 - DNA, 21 bp, synthetic construct
  misc_feature 1..21: note = Artificial sequence related to HLA knockouts in cell therapy
  source 1..21: mol_type = other DNA
gagcctacctggagggcacgt

SEQ ID NO: 20538 - DNA, 21 bp, synthetic construct
  misc_feature 1..21: note = Artificial sequence related to HLA knockouts in cell therapy
  source 1..21: mol_type = other DNA
agcctacctggagggcacgtg

SEQ ID NO: 20539 - DNA, 21 bp, synthetic construct
  misc_feature 1..21: note = Artificial sequence related to HLA knockouts in cell therapy
  source 1..21: mol_type = other DNA
gcctacctggagggcacgtgc

SEQ ID NO: 20540 - DNA, 21 bp, synthetic construct
  misc_feature 1..21: note = Artificial sequence related to HLA knockouts in cell therapy
  source 1..21: mol_type = other DNA
cctacctggagggcacgtgcg

SEQ ID NO: 20541 - DNA, 21 bp, synthetic construct
  misc_feature 1..21: note = Artificial sequence related to HLA knockouts in cell therapy
  source 1..21: mol_type = other DNA
ctacctggagggcacgtgcgt

SEQ ID NO: 20542 - DNA, 21 bp, synthetic construct
  misc_feature 1..21: note = Artificial sequence related to HLA knockouts in cell therapy
  source 1..21: mol_type = other DNA
tacctggagggcacgtgcgtg

SEQ ID NO: 20543 - DNA, 21 bp, synthetic construct
  misc_feature 1..21: note = Artificial sequence related to HLA knockouts in cell therapy
  source 1..21: mol_type = other DNA
acctggagggcacgtgcgtgg

SEQ ID NO: 20544 - DNA, 21 bp, synthetic construct
  misc_feature 1..21: note = Artificial sequence related to HLA knockouts in cell therapy
  source 1..21: mol_type = other DNA
cctggagggcacgtgcgtgga

SEQ ID NO: 20545 - DNA, 21 bp, synthetic construct
  misc_feature 1..21: note = Artificial sequence related to HLA knockouts in cell therapy
  source 1..21: mol_type = other DNA
ctggagggcacgtgcgtggag

SEQ ID NO: 20546 - DNA, 21 bp, synthetic construct
  misc_feature 1..21: note = Artificial sequence related to HLA knockouts in cell therapy
  source 1..21: mol_type = other DNA
tggagggcacgtgcgtggagt

SEQ ID NO: 20547 - DNA, 21 bp, synthetic construct
  misc_feature 1..21: note = Artificial sequence related to HLA knockouts in cell therapy
  source 1..21: mol_type = other DNA
ggagggcacgtgcgtggagtg

SEQ ID NO: 20548 - DNA, 21 bp, synthetic construct
  misc_feature 1..21: note = Artificial sequence related to HLA knockouts in cell therapy
  source 1..21: mol_type = other DNA
gagggcacgtgcgtggagtgg

SEQ ID NO: 20549 - DNA, 21 bp, synthetic construct
  misc_feature 1..21: note = Artificial sequence related to HLA knockouts in cell therapy
  source 1..21: mol_type = other DNA
agggcacgtgcgtggagtggc

SEQ ID NO: 20550 - DNA, 21 bp, synthetic construct
  misc_feature 1..21: note = Artificial sequence related to HLA knockouts in cell therapy
  source 1..21: mol_type = other DNA
gggcacgtgcgtggagtggct

SEQ ID NO: 20551 - DNA, 21 bp, synthetic construct
  misc_feature 1..21: note = Artificial sequence related to HLA knockouts in cell therapy
  source 1..21: mol_type = other DNA
ggcacgtgcgtggagtggctc

SEQ ID NO: 20552 - DNA, 21 bp, synthetic construct
  misc_feature 1..21: note = Artificial sequence related to HLA knockouts in cell therapy
  source 1..21: mol_type = other DNA
gcacgtgcgtggagtggctcc

SEQ ID NO: 20553 - DNA, 21 bp, synthetic construct
  misc_feature 1..21: note = Artificial sequence related to HLA knockouts in cell therapy
  source 1..21: mol_type = other DNA
cacgtgcgtggagtggctccg

SEQ ID NO: 20554 - DNA, 21 bp, synthetic construct
  misc_feature 1..21: note = Artificial sequence related to HLA knockouts in cell therapy
  source 1..21: mol_type = other DNA
acgtgcgtggagtggctccgc

SEQ ID NO: 20555 - DNA, 21 bp, synthetic construct
  misc_feature 1..21: note = Artificial sequence related to HLA knockouts in cell therapy
  source 1..21: mol_type = other DNA
cgtgcgtggagtggctccgca

SEQ ID NO: 20556 - DNA, 21 bp, synthetic construct
  misc_feature 1..21: note = Artificial sequence related to HLA knockouts in cell therapy
  source 1..21: mol_type = other DNA
gtgcgtggagtggctccgcag

SEQ ID NO: 20557 - DNA, 21 bp, synthetic construct
  misc_feature 1..21: note = Artificial sequence related to HLA knockouts in cell therapy
  source 1..21: mol_type = other DNA
tgcgtggagtggctccgcaga

SEQ ID NO: 20558 - DNA, 21 bp, synthetic construct
  misc_feature 1..21: note = Artificial sequence related to HLA knockouts in cell therapy
  source 1..21: mol_type = other DNA
gcgtggagtggctccgcagat

SEQ ID NO: 20559 - DNA, 21 bp, synthetic construct
  misc_feature 1..21: note = Artificial sequence related to HLA knockouts in cell therapy
  source 1..21: mol_type = other DNA
cgtggagtggctccgcagata

SEQ ID NO: 20560 - DNA, 21 bp, synthetic construct
  misc_feature 1..21: note = Artificial sequence related to HLA knockouts in cell therapy
  source 1..21: mol_type = other DNA
gtggagtggctccgcagatac

SEQ ID NO: 20561 - DNA, 21 bp, synthetic construct
  misc_feature 1..21: note = Artificial sequence related to HLA knockouts in cell therapy
  source 1..21: mol_type = other DNA
tggagtggctccgcagatacc

SEQ ID NO: 20562 - DNA, 21 bp, synthetic construct
  misc_feature 1..21: note = Artificial sequence related to HLA knockouts in cell therapy
  source 1..21: mol_type = other DNA
ggagtggctccgcagatacct

SEQ ID NO: 20563 - DNA, 21 bp, synthetic construct
  misc_feature 1..21: note = Artificial sequence related to HLA knockouts in cell therapy
  source 1..21: mol_type = other DNA
gagtggctccgcagatacctg

SEQ ID NO: 20564 - DNA, 21 bp, synthetic construct
  misc_feature 1..21: note = Artificial sequence related to HLA knockouts in cell therapy
  source 1..21: mol_type = other DNA
agtggctccgcagatacctgg

SEQ ID NO: 20565 - DNA, 21 bp, synthetic construct
  misc_feature 1..21: note = Artificial sequence related to HLA knockouts in cell therapy
  source 1..21: mol_type = other DNA
gtggctccgcagatacctgga

SEQ ID NO: 20566 - DNA, 21 bp, synthetic construct
  misc_feature 1..21: note = Artificial sequence related to HLA knockouts in cell therapy
  source 1..21: mol_type = other DNA
tggctccgcagatacctggag

SEQ ID NO: 20567 - DNA, 21 bp, synthetic construct
  misc_feature 1..21: note = Artificial sequence related to HLA knockouts in cell therapy
  source 1..21: mol_type = other DNA
ggctccgcagatacctggaga

SEQ ID NO: 20568 - DNA, 21 bp, synthetic construct
  misc_feature 1..21: note = Artificial sequence related to HLA knockouts in cell therapy
  source 1..21: mol_type = other DNA
ccgcagatacctggagaacgg

SEQ ID NO: 20569 - DNA, 21 bp, synthetic construct
  misc_feature 1..21: note = Artificial sequence related to HLA knockouts in cell therapy
  source 1..21: mol_type = other DNA
cgcagatacctggagaacggg

SEQ ID NO: 20570 - DNA, 21 bp, synthetic construct
  misc_feature 1..21: note = Artificial sequence related to HLA knockouts in cell therapy
  source 1..21: mol_type = other DNA
cctggagaacgggaaggagac

SEQ ID NO: 20571 - DNA, 21 bp, synthetic construct
  misc_feature 1..21: note = Artificial sequence related to HLA knockouts in cell therapy
  source 1..21: mol_type = other DNA
ctggagaacgggaaggagacg

SEQ ID NO: 20572 - DNA, 21 bp, synthetic construct
  misc_feature 1..21: note = Artificial sequence related to HLA knockouts in cell therapy
  source 1..21: mol_type = other DNA
tggagaacgggaaggagacgc

SEQ ID NO: 20573 - DNA, 21 bp, synthetic construct
  misc_feature 1..21: note = Artificial sequence related to HLA knockouts in cell therapy
  source 1..21: mol_type = other DNA
ggagaacgggaaggagacgct

SEQ ID NO: 20574 - DNA, 21 bp, synthetic construct
  misc_feature 1..21: note = Artificial sequence related to HLA knockouts in cell therapy
  source 1..21: mol_type = other DNA
gagaacgggaaggagacgctg

SEQ ID NO: 20575 - DNA, 21 bp, synthetic construct
  misc_feature 1..21: note = Artificial sequence related to HLA knockouts in cell therapy
  source 1..21: mol_type = other DNA
agaacgggaaggagacgctgc

SEQ ID NO: 20576 - DNA, 21 bp, synthetic construct
  misc_feature 1..21: note = Artificial sequence related to HLA knockouts in cell therapy
  source 1..21: mol_type = other DNA
gaacgggaaggagacgctgca

SEQ ID NO: 20577 - DNA, 21 bp, synthetic construct
  misc_feature 1..21: note = Artificial sequence related to HLA knockouts in cell therapy
  source 1..21: mol_type = other DNA
aacgggaaggagacgctgcag

SEQ ID NO: 20578 - DNA, 21 bp, synthetic construct
  misc_feature 1..21: note = Artificial sequence related to HLA knockouts in cell therapy
  source 1..21: mol_type = other DNA
acgggaaggagacgctgcagc

SEQ ID NO: 20579 - DNA, 21 bp, synthetic construct
  misc_feature 1..21: note = Artificial sequence related to HLA knockouts in cell therapy
  source 1..21: mol_type = other DNA
cgggaaggagacgctgcagcg

SEQ ID NO: 20580 - DNA, 21 bp, synthetic construct
  misc_feature 1..21: note = Artificial sequence related to HLA knockouts in cell therapy
  source 1..21: mol_type = other DNA
gggaaggagacgctgcagcgc

SEQ ID NO: 20581 - DNA, 21 bp, synthetic construct
  misc_feature 1..21: note = Artificial sequence related to HLA knockouts in cell therapy
  source 1..21: mol_type = other DNA
ggaaggagacgctgcagcgca

SEQ ID NO: 20582 - DNA, 21 bp, synthetic construct
  misc_feature 1..21: note = Artificial sequence related to HLA knockouts in cell therapy
  source 1..21: mol_type = other DNA
gaaggagacgctgcagcgcac

SEQ ID NO: 20583 - DNA, 21 bp, synthetic construct
  misc_feature 1..21: note = Artificial sequence related to HLA knockouts in cell therapy
  source 1..21: mol_type = other DNA
aaggagacgctgcagcgcacg

SEQ ID NO: 20584 - DNA, 21 bp, synthetic construct
  misc_feature 1..21: note = Artificial sequence related to HLA knockouts in cell therapy
  source 1..21: mol_type = other DNA
aggagacgctgcagcgcacgg

SEQ ID NO: 20585 - DNA, 21 bp, synthetic construct
  misc_feature 1..21: note = Artificial sequence related to HLA knockouts in cell therapy
  source 1..21: mol_type = other DNA
ggagacgctgcagcgcacgga

SEQ ID NO: 20586 - DNA, 21 bp, synthetic construct
  misc_feature 1..21: note = Artificial sequence related to HLA knockouts in cell therapy
  source 1..21: mol_type = other DNA
gagacgctgcagcgcacggac

SEQ ID NO: 20587 - DNA, 21 bp, synthetic construct
  misc_feature 1..21: note = Artificial sequence related to HLA knockouts in cell therapy
  source 1..21: mol_type = other DNA
agacgctgcagcgcacggacg

SEQ ID NO: 20588 - DNA, 21 bp, synthetic construct
  misc_feature 1..21: note = Artificial sequence related to HLA knockouts in cell therapy
  source 1..21: mol_type = other DNA
gacgctgcagcgcacggacgc

SEQ ID NO: 20589 - DNA, 21 bp, synthetic construct
  misc_feature 1..21: note = Artificial sequence related to HLA knockouts in cell therapy
  source 1..21: mol_type = other DNA
acgctgcagcgcacggacgcc

SEQ ID NO: 20590 - DNA, 21 bp, synthetic construct
  misc_feature 1..21: note = Artificial sequence related to HLA knockouts in cell therapy
  source 1..21: mol_type = other DNA
cgctgcagcgcacggacgccc

SEQ ID NO: 20591 - DNA, 21 bp, synthetic construct
  misc_feature 1..21: note = Artificial sequence related to HLA knockouts in cell therapy
  source 1..21: mol_type = other DNA
gctgcagcgcacggacgcccc

SEQ ID NO: 20592 - DNA, 21 bp, synthetic construct
  misc_feature 1..21: note = Artificial sequence related to HLA knockouts in cell therapy
  source 1..21: mol_type = other DNA
ctgcagcgcacggacgccccc

SEQ ID NO: 20593 - DNA, 21 bp, synthetic construct
  misc_feature 1..21: note = Artificial sequence related to HLA knockouts in cell therapy
  source 1..21: mol_type = other DNA
tgcagcgcacggacgccccca

SEQ ID NO: 20594 - DNA, 21 bp, synthetic construct
  misc_feature 1..21: note = Artificial sequence related to HLA knockouts in cell therapy
  source 1..21: mol_type = other DNA
gcagcgcacggacgcccccaa

SEQ ID NO: 20595 - DNA, 21 bp, synthetic construct
  misc_feature 1..21: note = Artificial sequence related to HLA knockouts in cell therapy
  source 1..21: mol_type = other DNA
cagcgcacggacgcccccaaa

SEQ ID NO: 20596 - DNA, 21 bp, synthetic construct
  misc_feature 1..21: note = Artificial sequence related to HLA knockouts in cell therapy
  source 1..21: mol_type = other DNA
agcgcacggacgcccccaaaa

SEQ ID NO: 20597 - DNA, 21 bp, synthetic construct
  misc_feature 1..21: note = Artificial sequence related to HLA knockouts in cell therapy
  source 1..21: mol_type = other DNA
gcgcacggacgcccccaaaac

SEQ ID NO: 20598 - DNA, 21 bp, synthetic construct
  misc_feature 1..21: note = Artificial sequence related to HLA knockouts in cell therapy
  source 1..21: mol_type = other DNA
cgcacggacgcccccaaaacg

SEQ ID NO: 20599 - DNA, 21 bp, synthetic construct
  misc_feature 1..21: note = Artificial sequence related to HLA knockouts in cell therapy
  source 1..21: mol_type = other DNA
gcacggacgcccccaaaacgc

SEQ ID NO: 20600 - DNA, 21 bp, synthetic construct
  misc_feature 1..21: note = Artificial sequence related to HLA knockouts in cell therapy
  source 1..21: mol_type = other DNA
cacggacgcccccaaaacgca

SEQ ID NO: 20601 - DNA, 21 bp, synthetic construct
  misc_feature 1..21: note = Artificial sequence related to HLA knockouts in cell therapy
  source 1..21: mol_type = other DNA
acggacgcccccaaaacgcat

SEQ ID NO: 20602 - DNA, 21 bp, synthetic construct
  misc_feature 1..21: note = Artificial sequence related to HLA knockouts in cell therapy
  source 1..21: mol_type = other DNA
cggacgcccccaaaacgcata

SEQ ID NO: 20603 - DNA, 21 bp, synthetic construct
  misc_feature 1..21: note = Artificial sequence related to HLA knockouts in cell therapy
  source 1..21: mol_type = other DNA
ctcaccacgctgtctctgacc

SEQ ID NO: 20604 - DNA, 21 bp, synthetic construct
  misc_feature 1..21: note = Artificial sequence related to HLA knockouts in cell therapy
  source 1..21: mol_type = other DNA
gaccatgaagccaccctgagg

SEQ ID NO: 20605 - DNA, 21 bp, synthetic construct
  misc_feature 1..21: note = Artificial sequence related to HLA knockouts in cell therapy
  source 1..21: mol_type = other DNA
ccatgaagccaccctgaggtg

SEQ ID NO: 20606 - DNA, 21 bp, synthetic construct
  misc_feature 1..21: note = Artificial sequence related to HLA knockouts in cell therapy
  source 1..21: mol_type = other DNA
catgaagccaccctgaggtgc

SEQ ID NO: 20607 - DNA, 21 bp, synthetic construct
  misc_feature 1..21: note = Artificial sequence related to HLA knockouts in cell therapy
  source 1..21: mol_type = other DNA
tgaagccaccctgaggtgctg

SEQ ID NO: 20608 - DNA, 21 bp, synthetic construct
  misc_feature 1..21: note = Artificial sequence related to HLA knockouts in cell therapy
  source 1..21: mol_type = other DNA
gaagccaccctgaggtgctgg

SEQ ID NO: 20609 - DNA, 21 bp, synthetic construct
  misc_feature 1..21: note = Artificial sequence related to HLA knockouts in cell therapy
  source 1..21: mol_type = other DNA
aagccaccctgaggtgctggg

SEQ ID NO: 20610 - DNA, 21 bp, synthetic construct
  misc_feature 1..21: note = Artificial sequence related to HLA knockouts in cell therapy
  source 1..21: mol_type = other DNA
agccaccctgaggtgctgggc

SEQ ID NO: 20611 - DNA, 21 bp, synthetic construct
  misc_feature 1..21: note = Artificial sequence related to HLA knockouts in cell therapy
  source 1..21: mol_type = other DNA
gccaccctgaggtgctgggcc

SEQ ID NO: 20612 - DNA, 21 bp, synthetic construct
  misc_feature 1..21: note = Artificial sequence related to HLA knockouts in cell therapy
  source 1..21: mol_type = other DNA
ccaccctgaggtgctgggccc

SEQ ID NO: 20613 - DNA, 21 bp, synthetic construct
  misc_feature 1..21: note = Artificial sequence related to HLA knockouts in cell therapy
  source 1..21: mol_type = other DNA
caccctgaggtgctgggccct

SEQ ID NO: 20614 - DNA, 21 bp, synthetic construct
  misc_feature 1..21: note = Artificial sequence related to HLA knockouts in cell therapy
  source 1..21: mol_type = other DNA
accctgaggtgctgggccctg

SEQ ID NO: 20615 - DNA, 21 bp, synthetic construct
  misc_feature 1..21: note = Artificial sequence related to HLA knockouts in cell therapy
  source 1..21: mol_type = other DNA
ccctgaggtgctgggccctga

SEQ ID NO: 20616 - DNA, 21 bp, synthetic construct
  misc_feature 1..21: note = Artificial sequence related to HLA knockouts in cell therapy
  source 1..21: mol_type = other DNA
cctgaggtgctgggccctgag

SEQ ID NO: 20617 - DNA, 21 bp, synthetic construct
  misc_feature 1..21: note = Artificial sequence related to HLA knockouts in cell therapy
  source 1..21: mol_type = other DNA
ctgaggtgctgggccctgagc

SEQ ID NO: 20618 - DNA, 21 bp, synthetic construct
  misc_feature 1..21: note = Artificial sequence related to HLA knockouts in cell therapy
  source 1..21: mol_type = other DNA
tgaggtgctgggccctgagct

SEQ ID NO: 20619 - DNA, 21 bp, synthetic construct
  misc_feature 1..21: note = Artificial sequence related to HLA knockouts in cell therapy
  source 1..21: mol_type = other DNA
gaggtgctgggccctgagctt

SEQ ID NO: 20620 - DNA, 21 bp, synthetic construct
  misc_feature 1..21: note = Artificial sequence related to HLA knockouts in cell therapy
  source 1..21: mol_type = other DNA
aggtgctgggccctgagcttc

SEQ ID NO: 20621 - DNA, 21 bp, synthetic construct
  misc_feature 1..21: note = Artificial sequence related to HLA knockouts in cell therapy
  source 1..21: mol_type = other DNA
ggtgctgggccctgagcttct

SEQ ID NO: 20622 - DNA, 21 bp, synthetic construct
  misc_feature 1..21: note = Artificial sequence related to HLA knockouts in cell therapy
  source 1..21: mol_type = other DNA
gtgctgggccctgagcttcta

SEQ ID NO: 20623 - DNA, 21 bp, synthetic construct
  misc_feature 1..21: note = Artificial sequence related to HLA knockouts in cell therapy
  source 1..21: mol_type = other DNA
tgctgggccctgagcttctac

SEQ ID NO: 20624 - DNA, 21 bp, synthetic construct
  misc_feature 1..21: note = Artificial sequence related to HLA knockouts in cell therapy
  source 1..21: mol_type = other DNA
gctgggccctgagcttctacc

SEQ ID NO: 20625 - DNA, 21 bp, synthetic construct
  misc_feature 1..21: note = Artificial sequence related to HLA knockouts in cell therapy
  source 1..21: mol_type = other DNA
ctgggccctgagcttctaccc

SEQ ID NO: 20626 - DNA, 21 bp, synthetic construct
  misc_feature 1..21: note = Artificial sequence related to HLA knockouts in cell therapy
  source 1..21: mol_type = other DNA
tgggccctgagcttctaccct

SEQ ID NO: 20627 - DNA, 21 bp, synthetic construct
  misc_feature 1..21: note = Artificial sequence related to HLA knockouts in cell therapy
  source 1..21: mol_type = other DNA
gggccctgagcttctaccctg

SEQ ID NO: 20628 - DNA, 21 bp, synthetic construct
  misc_feature 1..21: note = Artificial sequence related to HLA knockouts in cell therapy
  source 1..21: mol_type = other DNA
ggccctgagcttctaccctgc

SEQ ID NO: 20629 - DNA, 21 bp, synthetic construct
  misc_feature 1..21: note = Artificial sequence related to HLA knockouts in cell therapy
  source 1..21: mol_type = other DNA
gccctgagcttctaccctgcg

SEQ ID NO: 20630 - DNA, 21 bp, synthetic construct
  misc_feature 1..21: note = Artificial sequence related to HLA knockouts in cell therapy
  source 1..21: mol_type = other DNA
ccctgagcttctaccctgcgg

SEQ ID NO: 20631 - DNA, 21 bp, synthetic construct
  misc_feature 1..21: note = Artificial sequence related to HLA knockouts in cell therapy
  source 1..21: mol_type = other DNA
cctgagcttctaccctgcgga

SEQ ID NO: 20632 - DNA, 21 bp, synthetic construct
  misc_feature 1..21: note = Artificial sequence related to HLA knockouts in cell therapy
  source 1..21: mol_type = other DNA
ctgagcttctaccctgcggag

SEQ ID NO: 20633 - DNA, 21 bp, synthetic construct
  misc_feature 1..21: note = Artificial sequence related to HLA knockouts in cell therapy
  source 1..21: mol_type = other DNA
ccctgcggagatcacactgac

SEQ ID NO: 20634 - DNA, 21 bp, synthetic construct
  misc_feature 1..21: note = Artificial sequence related to HLA knockouts in cell therapy
  source 1..21: mol_type = other DNA
cctgcggagatcacactgacc

SEQ ID NO: 20635 - DNA, 21 bp, synthetic construct
  misc_feature 1..21: note = Artificial sequence related to HLA knockouts in cell therapy
  source 1..21: mol_type = other DNA
gcggagatcacactgacctgg

SEQ ID NO: 20636 - DNA, 21 bp, synthetic construct
  misc_feature 1..21: note = Artificial sequence related to HLA knockouts in cell therapy
  source 1..21: mol_type = other DNA
cggagatcacactgacctggc

SEQ ID NO: 20637 - DNA, 21 bp, synthetic construct
  misc_feature 1..21: note = Artificial sequence related to HLA knockouts in cell therapy
  source 1..21: mol_type = other DNA
gatcacactgacctggcagcg

SEQ ID NO: 20638 - DNA, 21 bp, synthetic construct
  misc_feature 1..21: note = Artificial sequence related to HLA knockouts in cell therapy
  source 1..21: mol_type = other DNA
atcacactgacctggcagcgg

SEQ ID NO: 20639 - DNA, 21 bp, synthetic construct
  misc_feature 1..21: note = Artificial sequence related to HLA knockouts in cell therapy
  source 1..21: mol_type = other DNA
tcacactgacctggcagcggg

SEQ ID NO: 20640 - DNA, 21 bp, synthetic construct
  misc_feature 1..21: note = Artificial sequence related to HLA knockouts in cell therapy
  source 1..21: mol_type = other DNA
cacactgacctggcagcggga

SEQ ID NO: 20641 - DNA, 21 bp, synthetic construct
  misc_feature 1..21: note = Artificial sequence related to HLA knockouts in cell therapy
  source 1..21: mol_type = other DNA
acactgacctggcagcgggat

SEQ ID NO: 20642 - DNA, 21 bp, synthetic construct
  misc_feature 1..21: note = Artificial sequence related to HLA knockouts in cell therapy
  source 1..21: mol_type = other DNA
cactgacctggcagcgggatg

SEQ ID NO: 20643 - DNA, 21 bp, synthetic construct
  misc_feature 1..21: note = Artificial sequence related to HLA knockouts in cell therapy
  source 1..21: mol_type = other DNA
actgacctggcagcgggatgg

SEQ ID NO: 20644 - DNA, 21 bp, synthetic construct
  misc_feature 1..21: note = Artificial sequence related to HLA knockouts in cell therapy
  source 1..21: mol_type = other DNA
ctgacctggcagcgggatggg

SEQ ID NO: 20645 - DNA, 21 bp, synthetic construct
  misc_feature 1..21: note = Artificial sequence related to HLA knockouts in cell therapy
  source 1..21: mol_type = other DNA
tgacctggcagcgggatgggg

SEQ ID NO: 20646 - DNA, 21 bp, synthetic construct
  misc_feature 1..21: note = Artificial sequence related to HLA knockouts in cell therapy
  source 1..21: mol_type = other DNA
gacctggcagcgggatgggga

SEQ ID NO: 20647 - DNA, 21 bp, synthetic construct
  misc_feature 1..21: note = Artificial sequence related to HLA knockouts in cell therapy
  source 1..21: mol_type = other DNA
acctggcagcgggatggggag

SEQ ID NO: 20648 - DNA, 21 bp, synthetic construct
  misc_feature 1..21: note = Artificial sequence related to HLA knockouts in cell therapy
  source 1..21: mol_type = other DNA
cctggcagcgggatggggagg

SEQ ID NO: 20649 - DNA, 21 bp, synthetic construct
  misc_feature 1..21: note = Artificial sequence related to HLA knockouts in cell therapy
  source 1..21: mol_type = other DNA
ctggcagcgggatggggagga

SEQ ID NO: 20650 - DNA, 21 bp, synthetic construct
  misc_feature 1..21: note = Artificial sequence related to HLA knockouts in cell therapy
  source 1..21: mol_type = other DNA
tggcagcgggatggggaggac

SEQ ID NO: 20651 - DNA, 21 bp, synthetic construct
  misc_feature 1..21: note = Artificial sequence related to HLA knockouts in cell therapy
  source 1..21: mol_type = other DNA
ggcagcgggatggggaggacc

SEQ ID NO: 20652 - DNA, 21 bp, synthetic construct
  misc_feature 1..21: note = Artificial sequence related to HLA knockouts in cell therapy
  source 1..21: mol_type = other DNA
gcagcgggatggggaggacca

SEQ ID NO: 20653 - DNA, 21 bp, synthetic construct
  misc_feature 1..21: note = Artificial sequence related to HLA knockouts in cell therapy
  source 1..21: mol_type = other DNA
cagcgggatggggaggaccag

SEQ ID NO: 20654 - DNA, 21 bp, synthetic construct
  misc_feature 1..21: note = Artificial sequence related to HLA knockouts in cell therapy
  source 1..21: mol_type = other DNA
agcgggatggggaggaccaga

SEQ ID NO: 20655 - DNA, 21 bp, synthetic construct
  misc_feature 1..21: note = Artificial sequence related to HLA knockouts in cell therapy
  source 1..21: mol_type = other DNA
gcgggatggggaggaccagac

SEQ ID NO: 20656 - DNA, 21 bp, synthetic construct
  misc_feature 1..21: note = Artificial sequence related to HLA knockouts in cell therapy
  source 1..21: mol_type = other DNA
cgggatggggaggaccagacc

SEQ ID NO: 20657 - DNA, 21 bp, synthetic construct
  misc_feature 1..21: note = Artificial sequence related to HLA knockouts in cell therapy
  source 1..21: mol_type = other DNA
gggatggggaggaccagaccc

SEQ ID NO: 20658 - DNA, 21 bp, synthetic construct
  misc_feature 1..21: note = Artificial sequence related to HLA knockouts in cell therapy
  source 1..21: mol_type = other DNA
ggatggggaggaccagaccca

SEQ ID NO: 20659 - DNA, 21 bp, synthetic construct
  misc_feature 1..21: note = Artificial sequence related to HLA knockouts in cell therapy
  source 1..21: mol_type = other DNA
gatggggaggaccagacccag

SEQ ID NO: 20660 - DNA, 21 bp, synthetic construct
  misc_feature 1..21: note = Artificial sequence related to HLA knockouts in cell therapy
  source 1..21: mol_type = other DNA
atggggaggaccagacccagg

SEQ ID NO: 20661 - DNA, 21 bp, synthetic construct
  misc_feature 1..21: note = Artificial sequence related to HLA knockouts in cell therapy
  source 1..21: mol_type = other DNA
tggggaggaccagacccagga

SEQ ID NO: 20662 - DNA, 21 bp, synthetic construct
  misc_feature 1..21: note = Artificial sequence related to HLA knockouts in cell therapy
  source 1..21: mol_type = other DNA
ggggaggaccagacccaggac

SEQ ID NO: 20663 - DNA, 21 bp, synthetic construct
  misc_feature 1..21: note = Artificial sequence related to HLA knockouts in cell therapy
  source 1..21: mol_type = other DNA
gggaggaccagacccaggaca

SEQ ID NO: 20664 - DNA, 21 bp, synthetic construct
  misc_feature 1..21: note = Artificial sequence related to HLA knockouts in cell therapy
  source 1..21: mol_type = other DNA
ggaggaccagacccaggacac

SEQ ID NO: 20665 - DNA, 21 bp, synthetic construct
  misc_feature 1..21: note = Artificial sequence related to HLA knockouts in cell therapy
  source 1..21: mol_type = other DNA
gaggaccagacccaggacacg

SEQ ID NO: 20666 - DNA, 21 bp, synthetic construct
  misc_feature 1..21: note = Artificial sequence related to HLA knockouts in cell therapy
  source 1..21: mol_type = other DNA
aggaccagacccaggacacgg

SEQ ID NO: 20667 - DNA, 21 bp, synthetic construct
  misc_feature 1..21: note = Artificial sequence related to HLA knockouts in cell therapy
  source 1..21: mol_type = other DNA
ggaccagacccaggacacgga

SEQ ID NO: 20668 - DNA, 21 bp, synthetic construct
  misc_feature 1..21: note = Artificial sequence related to HLA knockouts in cell therapy
  source 1..21: mol_type = other DNA
gaccagacccaggacacggag

SEQ ID NO: 20669 - DNA, 21 bp, synthetic construct
  misc_feature 1..21: note = Artificial sequence related to HLA knockouts in cell therapy
  source 1..21: mol_type = other DNA
accagacccaggacacggagc

SEQ ID NO: 20670 - DNA, 21 bp, synthetic construct
  misc_feature 1..21: note = Artificial sequence related to HLA knockouts in cell therapy
  source 1..21: mol_type = other DNA
ccagacccaggacacggagct

SEQ ID NO: 20671 - DNA, 21 bp, synthetic construct
  misc_feature 1..21: note = Artificial sequence related to HLA knockouts in cell therapy
  source 1..21: mol_type = other DNA
cagacccaggacacggagctc

SEQ ID NO: 20672 - DNA, 21 bp, synthetic construct
  misc_feature 1..21: note = Artificial sequence related to HLA knockouts in cell therapy
  source 1..21: mol_type = other DNA
agacccaggacacggagctcg

SEQ ID NO: 20673 - DNA, 21 bp, synthetic construct
  misc_feature 1..21: note = Artificial sequence related to HLA knockouts in cell therapy
  source 1..21: mol_type = other DNA
gacccaggacacggagctcgt

SEQ ID NO: 20674 - DNA, 21 bp, synthetic construct
  misc_feature 1..21: note = Artificial sequence related to HLA knockouts in cell therapy
  source 1..21: mol_type = other DNA
acccaggacacggagctcgtg

SEQ ID NO: 20675 - DNA, 21 bp, synthetic construct
  misc_feature 1..21: note = Artificial sequence related to HLA knockouts in cell therapy
  source 1..21: mol_type = other DNA
cccaggacacggagctcgtgg

SEQ ID NO: 20676 - DNA, 21 bp, synthetic construct
  misc_feature 1..21: note = Artificial sequence related to HLA knockouts in cell therapy
  source 1..21: mol_type = other DNA
ccaggacacggagctcgtgga

SEQ ID NO: 20677 - DNA, 21 bp, synthetic construct
  misc_feature 1..21: note = Artificial sequence related to HLA knockouts in cell therapy
  source 1..21: mol_type = other DNA
caggacacggagctcgtggag

SEQ ID NO: 20678 - DNA, 21 bp, synthetic construct
  misc_feature 1..21: note = Artificial sequence related to HLA knockouts in cell therapy
  source 1..21: mol_type = other DNA
aggacacggagctcgtggaga

SEQ ID NO: 20679 - DNA, 21 bp, synthetic construct
  misc_feature 1..21: note = Artificial sequence related to HLA knockouts in cell therapy
  source 1..21: mol_type = other DNA
ggacacggagctcgtggagac

SEQ ID NO: 20680 - DNA, 21 bp, synthetic construct
  misc_feature 1..21: note = Artificial sequence related to HLA knockouts in cell therapy
  source 1..21: mol_type = other DNA
gacacggagctcgtggagacc

SEQ ID NO: 20681 - DNA, 21 bp, synthetic construct
  misc_feature 1..21: note = Artificial sequence related to HLA knockouts in cell therapy
  source 1..21: mol_type = other DNA
acacggagctcgtggagacca

SEQ ID NO: 20682 - DNA, 21 bp, synthetic construct
  misc_feature 1..21: note = Artificial sequence related to HLA knockouts in cell therapy
  source 1..21: mol_type = other DNA
cacggagctcgtggagaccag

SEQ ID NO: 20683 - DNA, 21 bp, synthetic construct
  misc_feature 1..21: note = Artificial sequence related to HLA knockouts in cell therapy
  source 1..21: mol_type = other DNA
acggagctcgtggagaccagg

SEQ ID NO: 20684 - DNA, 21 bp, synthetic construct
  misc_feature 1..21: note = Artificial sequence related to HLA knockouts in cell therapy
  source 1..21: mol_type = other DNA
cggagctcgtggagaccaggc

SEQ ID NO: 20685 - DNA, 21 bp, synthetic construct
  misc_feature 1..21: note = Artificial sequence related to HLA knockouts in cell therapy
  source 1..21: mol_type = other DNA
ggagctcgtggagaccaggcc

SEQ ID NO: 20686 - DNA, 21 bp, synthetic construct
  misc_feature 1..21: note = Artificial sequence related to HLA knockouts in cell therapy
  source 1..21: mol_type = other DNA
gagctcgtggagaccaggcct

SEQ ID NO: 20687 - DNA, 21 bp, synthetic construct
  misc_feature 1..21: note = Artificial sequence related to HLA knockouts in cell therapy
  source 1..21: mol_type = other DNA
agctcgtggagaccaggcctg

SEQ ID NO: 20688 - DNA, 21 bp, synthetic construct
  misc_feature 1..21: note = Artificial sequence related to HLA knockouts in cell therapy
  source 1..21: mol_type = other DNA
gctcgtggagaccaggcctgc

SEQ ID NO: 20689 - DNA, 21 bp, synthetic construct
  misc_feature 1..21: note = Artificial sequence related to HLA knockouts in cell therapy
  source 1..21: mol_type = other DNA
ctcgtggagaccaggcctgca

SEQ ID NO: 20690 - DNA, 21 bp, synthetic construct
  misc_feature 1..21: note = Artificial sequence related to HLA knockouts in cell therapy
  source 1..21: mol_type = other DNA
tcgtggagaccaggcctgcag

SEQ ID NO: 20691 - DNA, 21 bp, synthetic construct
  misc_feature 1..21: note = Artificial sequence related to HLA knockouts in cell therapy
  source 1..21: mol_type = other DNA
cgtggagaccaggcctgcagg

SEQ ID NO: 20692 - DNA, 21 bp, synthetic construct
  misc_feature 1..21: note = Artificial sequence related to HLA knockouts in cell therapy
  source 1..21: mol_type = other DNA
gtggagaccaggcctgcaggg

SEQ ID NO: 20693 - DNA, 21 bp, synthetic construct
  misc_feature 1..21: note = Artificial sequence related to HLA knockouts in cell therapy
  source 1..21: mol_type = other DNA
tggagaccaggcctgcagggg

SEQ ID NO: 20694 - DNA, 21 bp, synthetic construct
  misc_feature 1..21: note = Artificial sequence related to HLA knockouts in cell therapy
  source 1..21: mol_type = other DNA
ggagaccaggcctgcagggga

SEQ ID NO: 20695 - DNA, 21 bp, synthetic construct
  misc_feature 1..21: note = Artificial sequence related to HLA knockouts in cell therapy
  source 1..21: mol_type = other DNA
gagaccaggcctgcaggggat

SEQ ID NO: 20696 - DNA, 21 bp, synthetic construct
  misc_feature 1..21: note = Artificial sequence related to HLA knockouts in cell therapy
  source 1..21: mol_type = other DNA
agaccaggcctgcaggggatg

SEQ ID NO: 20697 - DNA, 21 bp, synthetic construct
  misc_feature 1..21: note = Artificial sequence related to HLA knockouts in cell therapy
  source 1..21: mol_type = other DNA
gaccaggcctgcaggggatgg

SEQ ID NO: 20698 - DNA, 21 bp, synthetic construct
  misc_feature 1..21: note = Artificial sequence related to HLA knockouts in cell therapy
  source 1..21: mol_type = other DNA
accaggcctgcaggggatgga

SEQ ID NO: 20699 - DNA, 21 bp, synthetic construct
  misc_feature 1..21: note = Artificial sequence related to HLA knockouts in cell therapy
  source 1..21: mol_type = other DNA
ccaggcctgcaggggatggaa

SEQ ID NO: 20700 - DNA, 21 bp, synthetic construct
  misc_feature 1..21: note = Artificial sequence related to HLA knockouts in cell therapy
  source 1..21: mol_type = other DNA
caggcctgcaggggatggaac

SEQ ID NO: 20701 - DNA, 21 bp, synthetic construct
  misc_feature 1..21: note = Artificial sequence related to HLA knockouts in cell therapy
  source 1..21: mol_type = other DNA
aggcctgcaggggatggaacc

SEQ ID NO: 20702 - DNA, 21 bp, synthetic construct
  misc_feature 1..21: note = Artificial sequence related to HLA knockouts in cell therapy
  source 1..21: mol_type = other DNA
ggcctgcaggggatggaacct

SEQ ID NO: 20703 - DNA, 21 bp, synthetic construct
  misc_feature 1..21: note = Artificial sequence related to HLA knockouts in cell therapy
  source 1..21: mol_type = other DNA
gcctgcaggggatggaacctt

SEQ ID NO: 20704 - DNA, 21 bp, synthetic construct
  misc_feature 1..21: note = Artificial sequence related to HLA knockouts in cell therapy
  source 1..21: mol_type = other DNA
cctgcaggggatggaaccttc

SEQ ID NO: 20705 - DNA, 21 bp, synthetic construct
  misc_feature 1..21: note = Artificial sequence related to HLA knockouts in cell therapy
  source 1..21: mol_type = other DNA
ctgcaggggatggaaccttcc

SEQ ID NO: 20706 - DNA, 21 bp, synthetic construct
  misc_feature 1..21: note = Artificial sequence related to HLA knockouts in cell therapy
  source 1..21: mol_type = other DNA
gcaggggatggaaccttccag

SEQ ID NO: 20707 - DNA, 21 bp, synthetic construct
  misc_feature 1..21: note = Artificial sequence related to HLA knockouts in cell therapy
  source 1..21: mol_type = other DNA
ggaaccttccagaagtgggcg

SEQ ID NO: 20708 - DNA, 21 bp, synthetic construct
  misc_feature 1..21: note = Artificial sequence related to HLA knockouts in cell therapy
  source 1..21: mol_type = other DNA
gaaccttccagaagtgggcgg

SEQ ID NO: 20709 - DNA, 21 bp, synthetic construct
  misc_feature 1..21: note = Artificial sequence related to HLA knockouts in cell therapy
  source 1..21: mol_type = other DNA
aaccttccagaagtgggcggc

SEQ ID NO: 20710 - DNA, 21 bp, synthetic construct
  misc_feature 1..21: note = Artificial sequence related to HLA knockouts in cell therapy
  source 1..21: mol_type = other DNA
accttccagaagtgggcggct

SEQ ID NO: 20711 - DNA, 21 bp, synthetic construct
  misc_feature 1..21: note = Artificial sequence related to HLA knockouts in cell therapy
  source 1..21: mol_type = other DNA
ccttccagaagtgggcggctg

SEQ ID NO: 20712 - DNA, 21 bp, synthetic construct
  misc_feature 1..21: note = Artificial sequence related to HLA knockouts in cell therapy
  source 1..21: mol_type = other DNA
cttccagaagtgggcggctgt

SEQ ID NO: 20713 - DNA, 21 bp, synthetic construct
  misc_feature 1..21: note = Artificial sequence related to HLA knockouts in cell therapy
  source 1..21: mol_type = other DNA
ttccagaagtgggcggctgtg

SEQ ID NO: 20714 - DNA, 21 bp, synthetic construct
  misc_feature 1..21: note = Artificial sequence related to HLA knockouts in cell therapy
  source 1..21: mol_type = other DNA
tccagaagtgggcggctgtgg

SEQ ID NO: 20715 - DNA, 21 bp, synthetic construct
  misc_feature 1..21: note = Artificial sequence related to HLA knockouts in cell therapy
  source 1..21: mol_type = other DNA
ccagaagtgggcggctgtggt

SEQ ID NO: 20716 - DNA, 21 bp, synthetic construct
  misc_feature 1..21: note = Artificial sequence related to HLA knockouts in cell therapy
  source 1..21: mol_type = other DNA
cagaagtgggcggctgtggtg

SEQ ID NO: 20717 - DNA, 21 bp, synthetic construct
  misc_feature 1..21: note = Artificial sequence related to HLA knockouts in cell therapy
  source 1..21: mol_type = other DNA
agaagtgggcggctgtggtgg

SEQ ID NO: 20718 - DNA, 21 bp, synthetic construct
  misc_feature 1..21: note = Artificial sequence related to HLA knockouts in cell therapy
  source 1..21: mol_type = other DNA
gaagtgggcggctgtggtggt

SEQ ID NO: 20719 - DNA, 21 bp, synthetic construct
  misc_feature 1..21: note = Artificial sequence related to HLA knockouts in cell therapy
  source 1..21: mol_type = other DNA
aagtgggcggctgtggtggtg

SEQ ID NO: 20720 - DNA, 21 bp, synthetic construct
  misc_feature 1..21: note = Artificial sequence related to HLA knockouts in cell therapy
  source 1..21: mol_type = other DNA
agtgggcggctgtggtggtgc

SEQ ID NO: 20721 - DNA, 21 bp, synthetic construct
  misc_feature 1..21: note = Artificial sequence related to HLA knockouts in cell therapy
  source 1..21: mol_type = other DNA
gtgggcggctgtggtggtgcc

SEQ ID NO: 20722 - DNA, 21 bp, synthetic construct
  misc_feature 1..21: note = Artificial sequence related to HLA knockouts in cell therapy
  source 1..21: mol_type = other DNA
tgggcggctgtggtggtgcct

SEQ ID NO: 20723 - DNA, 21 bp, synthetic construct
  misc_feature 1..21: note = Artificial sequence related to HLA knockouts in cell therapy
  source 1..21: mol_type = other DNA
gggcggctgtggtggtgcctt

SEQ ID NO: 20724 - DNA, 21 bp, synthetic construct
  misc_feature 1..21: note = Artificial sequence related to HLA knockouts in cell therapy
  source 1..21: mol_type = other DNA
ggcggctgtggtggtgccttc

SEQ ID NO: 20725 - DNA, 21 bp, synthetic construct
  misc_feature 1..21: note = Artificial sequence related to HLA knockouts in cell therapy
  source 1..21: mol_type = other DNA
gcggctgtggtggtgccttct

SEQ ID NO: 20726 - DNA, 21 bp, synthetic construct
  misc_feature 1..21: note = Artificial sequence related to HLA knockouts in cell therapy
  source 1..21: mol_type = other DNA
cggctgtggtggtgccttctg

SEQ ID NO: 20727 - DNA, 21 bp, synthetic construct
  misc_feature 1..21: note = Artificial sequence related to HLA knockouts in cell therapy
  source 1..21: mol_type = other DNA
ggctgtggtggtgccttctgg

SEQ ID NO: 20728 - DNA, 21 bp, synthetic construct
  misc_feature 1..21: note = Artificial sequence related to HLA knockouts in cell therapy
  source 1..21: mol_type = other DNA
gctgtggtggtgccttctgga

SEQ ID NO: 20729 - DNA, 21 bp, synthetic construct
  misc_feature 1..21: note = Artificial sequence related to HLA knockouts in cell therapy
  source 1..21: mol_type = other DNA
ctgtggtggtgccttctggac

SEQ ID NO: 20730 - DNA, 21 bp, synthetic construct
  misc_feature 1..21: note = Artificial sequence related to HLA knockouts in cell therapy
  source 1..21: mol_type = other DNA
gtggtggtgccttctggacag

SEQ ID NO: 20731 - DNA, 21 bp, synthetic construct
  misc_feature 1..21: note = Artificial sequence related to HLA knockouts in cell therapy
  source 1..21: mol_type = other DNA
tggtggtgccttctggacagg

SEQ ID NO: 20732 - DNA, 21 bp, synthetic construct
  misc_feature 1..21: note = Artificial sequence related to HLA knockouts in cell therapy
  source 1..21: mol_type = other DNA
ggtggtgccttctggacagga

SEQ ID NO: 20733 - DNA, 21 bp, synthetic construct
  misc_feature 1..21: note = Artificial sequence related to HLA knockouts in cell therapy
  source 1..21: mol_type = other DNA
gtggtgccttctggacaggag

SEQ ID NO: 20734 - DNA, 21 bp, synthetic construct
  misc_feature 1..21: note = Artificial sequence related to HLA knockouts in cell therapy
  source 1..21: mol_type = other DNA
tggtgccttctggacaggagc

SEQ ID NO: 20735 - DNA, 21 bp, synthetic construct
  misc_feature 1..21: note = Artificial sequence related to HLA knockouts in cell therapy
  source 1..21: mol_type = other DNA
ggtgccttctggacaggagca

SEQ ID NO: 20736 - DNA, 21 bp, synthetic construct
  misc_feature 1..21: note = Artificial sequence related to HLA knockouts in cell therapy
  source 1..21: mol_type = other DNA
gtgccttctggacaggagcag

SEQ ID NO: 20737 - DNA, 21 bp, synthetic construct
  misc_feature 1..21: note = Artificial sequence related to HLA knockouts in cell therapy
  source 1..21: mol_type = other DNA
gccttctggacaggagcagag

SEQ ID NO: 20738 - DNA, 21 bp, synthetic construct
  misc_feature 1..21: note = Artificial sequence related to HLA knockouts in cell therapy
  source 1..21: mol_type = other DNA
cctgccatgtgcagcatgagg

SEQ ID NO: 20739 - DNA, 21 bp, synthetic construct
  misc_feature 1..21: note = Artificial sequence related to HLA knockouts in cell therapy
  source 1..21: mol_type = other DNA
ctgccatgtgcagcatgaggg

SEQ ID NO: 20740 - DNA, 21 bp, synthetic construct
  misc_feature 1..21: note = Artificial sequence related to HLA knockouts in cell therapy
  source 1..21: mol_type = other DNA
gtgcagcatgagggtttgccc

SEQ ID NO: 20741 - DNA, 21 bp, synthetic construct
  misc_feature 1..21: note = Artificial sequence related to HLA knockouts in cell therapy
  source 1..21: mol_type = other DNA
gcatgagggtttgcccaagcc

SEQ ID NO: 20742 - DNA, 21 bp, synthetic construct
  misc_feature 1..21: note = Artificial sequence related to HLA knockouts in cell therapy
  source 1..21: mol_type = other DNA
catgagggtttgcccaagccc

SEQ ID NO: 20743 - DNA, 21 bp, synthetic construct
  misc_feature 1..21: note = Artificial sequence related to HLA knockouts in cell therapy
  source 1..21: mol_type = other DNA
atgagggtttgcccaagcccc

SEQ ID NO: 20744 - DNA, 21 bp, synthetic construct
  misc_feature 1..21: note = Artificial sequence related to HLA knockouts in cell therapy
  source 1..21: mol_type = other DNA
tgagggtttgcccaagcccct

SEQ ID NO: 20745 - DNA, 21 bp, synthetic construct
  misc_feature 1..21: note = Artificial sequence related to HLA knockouts in cell therapy
  source 1..21: mol_type = other DNA
gagggtttgcccaagcccctc

SEQ ID NO: 20746 - DNA, 21 bp, synthetic construct
  misc_feature 1..21: note = Artificial sequence related to HLA knockouts in cell therapy
  source 1..21: mol_type = other DNA
agggtttgcccaagcccctca

SEQ ID NO: 20747 - DNA, 21 bp, synthetic construct
  misc_feature 1..21: note = Artificial sequence related to HLA knockouts in cell therapy
  source 1..21: mol_type = other DNA
gggtttgcccaagcccctcac

SEQ ID NO: 20748 - DNA, 21 bp, synthetic construct
  misc_feature 1..21: note = Artificial sequence related to HLA knockouts in cell therapy
  source 1..21: mol_type = other DNA
ggtttgcccaagcccctcacc

SEQ ID NO: 20749 - DNA, 21 bp, synthetic construct
  misc_feature 1..21: note = Artificial sequence related to HLA knockouts in cell therapy
  source 1..21: mol_type = other DNA
gtttgcccaagcccctcaccc

SEQ ID NO: 20750 - DNA, 21 bp, synthetic construct
  misc_feature 1..21: note = Artificial sequence related to HLA knockouts in cell therapy
  source 1..21: mol_type = other DNA
tttgcccaagcccctcaccct

SEQ ID NO: 20751 - DNA, 21 bp, synthetic construct
  misc_feature 1..21: note = Artificial sequence related to HLA knockouts in cell therapy
  source 1..21: mol_type = other DNA
ttgcccaagcccctcaccctg

SEQ ID NO: 20752 - DNA, 21 bp, synthetic construct
  misc_feature 1..21: note = Artificial sequence related to HLA knockouts in cell therapy
  source 1..21: mol_type = other DNA
tgcccaagcccctcaccctga

SEQ ID NO: 20753 - DNA, 21 bp, synthetic construct
  misc_feature 1..21: note = Artificial sequence related to HLA knockouts in cell therapy
  source 1..21: mol_type = other DNA
gcccaagcccctcaccctgag

SEQ ID NO: 20754 - DNA, 21 bp, synthetic construct
  misc_feature 1..21: note = Artificial sequence related to HLA knockouts in cell therapy
  source 1..21: mol_type = other DNA
cccaagcccctcaccctgaga

SEQ ID NO: 20755 - DNA, 21 bp, synthetic construct
  misc_feature 1..21: note = Artificial sequence related to HLA knockouts in cell therapy
  source 1..21: mol_type = other DNA
ccaagcccctcaccctgagat

SEQ ID NO: 20756 - DNA, 21 bp, synthetic construct
  misc_feature 1..21: note = Artificial sequence related to HLA knockouts in cell therapy
  source 1..21: mol_type = other DNA
caagcccctcaccctgagatg

SEQ ID NO: 20757 - DNA, 21 bp, synthetic construct
  misc_feature 1..21: note = Artificial sequence related to HLA knockouts in cell therapy
  source 1..21: mol_type = other DNA
aagcccctcaccctgagatgg

SEQ ID NO: 20758 - DNA, 21 bp, synthetic construct
  misc_feature 1..21: note = Artificial sequence related to HLA knockouts in cell therapy
  source 1..21: mol_type = other DNA
agcccctcaccctgagatggg

SEQ ID NO: 20759 - DNA, 21 bp, synthetic construct
  misc_feature 1..21: note = Artificial sequence related to HLA knockouts in cell therapy
  source 1..21: mol_type = other DNA
gcccctcaccctgagatggga

SEQ ID NO: 20760 - DNA, 21 bp, synthetic construct
  misc_feature 1..21: note = Artificial sequence related to HLA knockouts in cell therapy
  source 1..21: mol_type = other DNA
cccctcaccctgagatgggag

SEQ ID NO: 20761 - DNA, 21 bp, synthetic construct
  misc_feature 1..21: note = Artificial sequence related to HLA knockouts in cell therapy
  source 1..21: mol_type = other DNA
ccctcaccctgagatgggagc

SEQ ID NO: 20762 - DNA, 21 bp, synthetic construct
  misc_feature 1..21: note = Artificial sequence related to HLA knockouts in cell therapy
  source 1..21: mol_type = other DNA
cctcaccctgagatgggagcc

SEQ ID NO: 20763 - DNA, 21 bp, synthetic construct
  misc_feature 1..21: note = Artificial sequence related to HLA knockouts in cell therapy
  source 1..21: mol_type = other DNA
ctcaccctgagatgggagccg

SEQ ID NO: 20764 - DNA, 21 bp, synthetic construct
  misc_feature 1..21: note = Artificial sequence related to HLA knockouts in cell therapy
  source 1..21: mol_type = other DNA
tcaccctgagatgggagccgt

SEQ ID NO: 20765 - DNA, 21 bp, synthetic construct
  misc_feature 1..21: note = Artificial sequence related to HLA knockouts in cell therapy
  source 1..21: mol_type = other DNA
caccctgagatgggagccgtc

SEQ ID NO: 20766 - DNA, 21 bp, synthetic construct
  misc_feature 1..21: note = Artificial sequence related to HLA knockouts in cell therapy
  source 1..21: mol_type = other DNA
accctgagatgggagccgtct

SEQ ID NO: 20767 - DNA, 21 bp, synthetic construct
  misc_feature 1..21: note = Artificial sequence related to HLA knockouts in cell therapy
  source 1..21: mol_type = other DNA
ccctgagatgggagccgtctt

SEQ ID NO: 20768 - DNA, 21 bp, synthetic construct
  misc_feature 1..21: note = Artificial sequence related to HLA knockouts in cell therapy
  source 1..21: mol_type = other DNA
cctgagatgggagccgtcttc

SEQ ID NO: 20769 - DNA, 21 bp, synthetic construct
  misc_feature 1..21: note = Artificial sequence related to HLA knockouts in cell therapy
  source 1..21: mol_type = other DNA
ctgagatgggagccgtcttcc

SEQ ID NO: 20770 - DNA, 21 bp, synthetic construct
  misc_feature 1..21: note = Artificial sequence related to HLA knockouts in cell therapy
  source 1..21: mol_type = other DNA
tgagatgggagccgtcttccc

SEQ ID NO: 20771 - DNA, 21 bp, synthetic construct
  misc_feature 1..21: note = Artificial sequence related to HLA knockouts in cell therapy
  source 1..21: mol_type = other DNA
gagatgggagccgtcttccca

SEQ ID NO: 20772 - DNA, 21 bp, synthetic construct
  misc_feature 1..21: note = Artificial sequence related to HLA knockouts in cell therapy
  source 1..21: mol_type = other DNA
agatgggagccgtcttcccag

SEQ ID NO: 20773 - DNA, 21 bp, synthetic construct
  misc_feature 1..21: note = Artificial sequence related to HLA knockouts in cell therapy
  source 1..21: mol_type = other DNA
gatgggagccgtcttcccagc

SEQ ID NO: 20774 - DNA, 21 bp, synthetic construct
  misc_feature 1..21: note = Artificial sequence related to HLA knockouts in cell therapy
  source 1..21: mol_type = other DNA
atgggagccgtcttcccagcc

SEQ ID NO: 20775 - DNA, 21 bp, synthetic construct
  misc_feature 1..21: note = Artificial sequence related to HLA knockouts in cell therapy
  source 1..21: mol_type = other DNA
tgggagccgtcttcccagccc

SEQ ID NO: 20776 - DNA, 21 bp, synthetic construct
  misc_feature 1..21: note = Artificial sequence related to HLA knockouts in cell therapy
  source 1..21: mol_type = other DNA
gggagccgtcttcccagccca

SEQ ID NO: 20777 - DNA, 21 bp, synthetic construct
  misc_feature 1..21: note = Artificial sequence related to HLA knockouts in cell therapy
  source 1..21: mol_type = other DNA
ggagccgtcttcccagcccac

SEQ ID NO: 20778 - DNA, 21 bp, synthetic construct
  misc_feature 1..21: note = Artificial sequence related to HLA knockouts in cell therapy
  source 1..21: mol_type = other DNA
gagccgtcttcccagcccacc

SEQ ID NO: 20779 - DNA, 21 bp, synthetic construct
  misc_feature 1..21: note = Artificial sequence related to HLA knockouts in cell therapy
  source 1..21: mol_type = other DNA
agccgtcttcccagcccacca

SEQ ID NO: 20780 - DNA, 21 bp, synthetic construct
  misc_feature 1..21: note = Artificial sequence related to HLA knockouts in cell therapy
  source 1..21: mol_type = other DNA
gccgtcttcccagcccaccat

SEQ ID NO: 20781 - DNA, 21 bp, synthetic construct
  misc_feature 1..21: note = Artificial sequence related to HLA knockouts in cell therapy
  source 1..21: mol_type = other DNA
ccgtcttcccagcccaccatc

SEQ ID NO: 20782 - DNA, 21 bp, synthetic construct
  misc_feature 1..21: note = Artificial sequence related to HLA knockouts in cell therapy
  source 1..21: mol_type = other DNA
cgtcttcccagcccaccatcc

SEQ ID NO: 20783 - DNA, 21 bp, synthetic construct
  misc_feature 1..21: note = Artificial sequence related to HLA knockouts in cell therapy
  source 1..21: mol_type = other DNA
gtcttcccagcccaccatccc

SEQ ID NO: 20784 - DNA, 21 bp, synthetic construct
  misc_feature 1..21: note = Artificial sequence related to HLA knockouts in cell therapy
  source 1..21: mol_type = other DNA
tcttcccagcccaccatcccc

SEQ ID NO: 20785 - DNA, 21 bp, synthetic construct
  misc_feature 1..21: note = Artificial sequence related to HLA knockouts in cell therapy
  source 1..21: mol_type = other DNA
cttcccagcccaccatcccca

SEQ ID NO: 20786 - DNA, 21 bp, synthetic construct
  misc_feature 1..21: note = Artificial sequence related to HLA knockouts in cell therapy
  source 1..21: mol_type = other DNA
ttcccagcccaccatccccat

SEQ ID NO: 20787 - DNA, 21 bp, synthetic construct
  misc_feature 1..21: note = Artificial sequence related to HLA knockouts in cell therapy
  source 1..21: mol_type = other DNA
tcccagcccaccatccccatc

SEQ ID NO: 20788 - DNA, 21 bp, synthetic construct
  misc_feature 1..21: note = Artificial sequence related to HLA knockouts in cell therapy
  source 1..21: mol_type = other DNA
cccagcccaccatccccatcg

SEQ ID NO: 20789 - DNA, 21 bp, synthetic construct
  misc_feature 1..21: note = Artificial sequence related to HLA knockouts in cell therapy
  source 1..21: mol_type = other DNA
ccagcccaccatccccatcgt

SEQ ID NO: 20790 - DNA, 21 bp, synthetic construct
  misc_feature 1..21: note = Artificial sequence related to HLA knockouts in cell therapy
  source 1..21: mol_type = other DNA
cagcccaccatccccatcgtg

SEQ ID NO: 20791 - DNA, 21 bp, synthetic construct
  misc_feature 1..21: note = Artificial sequence related to HLA knockouts in cell therapy
  source 1..21: mol_type = other DNA
agcccaccatccccatcgtgg

SEQ ID NO: 20792 - DNA, 21 bp, synthetic construct
  misc_feature 1..21: note = Artificial sequence related to HLA knockouts in cell therapy
  source 1..21: mol_type = other DNA
gcccaccatccccatcgtggg

SEQ ID NO: 20793 - DNA, 21 bp, synthetic construct
  misc_feature 1..21: note = Artificial sequence related to HLA knockouts in cell therapy
  source 1..21: mol_type = other DNA
cccaccatccccatcgtgggc

SEQ ID NO: 20794 - DNA, 21 bp, synthetic construct
  misc_feature 1..21: note = Artificial sequence related to HLA knockouts in cell therapy
  source 1..21: mol_type = other DNA
ccaccatccccatcgtgggca

SEQ ID NO: 20795 - DNA, 21 bp, synthetic construct
  misc_feature 1..21: note = Artificial sequence related to HLA knockouts in cell therapy
  source 1..21: mol_type = other DNA
caccatccccatcgtgggcat

SEQ ID NO: 20796 - DNA, 21 bp, synthetic construct
  misc_feature 1..21: note = Artificial sequence related to HLA knockouts in cell therapy
  source 1..21: mol_type = other DNA
accatccccatcgtgggcatc

SEQ ID NO: 20797 - DNA, 21 bp, synthetic construct
  misc_feature 1..21: note = Artificial sequence related to HLA knockouts in cell therapy
  source 1..21: mol_type = other DNA
ccatccccatcgtgggcatca

SEQ ID NO: 20798 - DNA, 21 bp, synthetic construct
  misc_feature 1..21: note = Artificial sequence related to HLA knockouts in cell therapy
  source 1..21: mol_type = other DNA
ccccatcgtgggcatcattgc

SEQ ID NO: 20799 - DNA, 21 bp, synthetic construct
  misc_feature 1..21: note = Artificial sequence related to HLA knockouts in cell therapy
  source 1..21: mol_type = other DNA
tcgtgggcatcattgctggcc

SEQ ID NO: 20800 - DNA, 21 bp, synthetic construct
  misc_feature 1..21: note = Artificial sequence related to HLA knockouts in cell therapy
  source 1..21: mol_type = other DNA
cgtgggcatcattgctggcct

SEQ ID NO: 20801 - DNA, 21 bp, synthetic construct
  misc_feature 1..21: note = Artificial sequence related to HLA knockouts in cell therapy
  source 1..21: mol_type = other DNA
gtgggcatcattgctggcctg

SEQ ID NO: 20802 - DNA, 21 bp, synthetic construct
  misc_feature 1..21: note = Artificial sequence related to HLA knockouts in cell therapy
  source 1..21: mol_type = other DNA
tgggcatcattgctggcctgg

SEQ ID NO: 20803 - DNA, 21 bp, synthetic construct
  misc_feature 1..21: note = Artificial sequence related to HLA knockouts in cell therapy
  source 1..21: mol_type = other DNA
gggcatcattgctggcctggt

SEQ ID NO: 20804 - DNA, 21 bp, synthetic construct
  misc_feature 1..21: note = Artificial sequence related to HLA knockouts in cell therapy
  source 1..21: mol_type = other DNA
gatcactggagctgtggtcgc

SEQ ID NO: 20805 - DNA, 21 bp, synthetic construct
  misc_feature 1..21: note = Artificial sequence related to HLA knockouts in cell therapy
  source 1..21: mol_type = other DNA
tcactggagctgtggtcgctg

SEQ ID NO: 20806 - DNA, 21 bp, synthetic construct
  misc_feature 1..21: note = Artificial sequence related to HLA knockouts in cell therapy
  source 1..21: mol_type = other DNA
cactggagctgtggtcgctgc

SEQ ID NO: 20807 - DNA, 21 bp, synthetic construct
  misc_feature 1..21: note = Artificial sequence related to HLA knockouts in cell therapy
  source 1..21: mol_type = other DNA
actggagctgtggtcgctgct

SEQ ID NO: 20808 - DNA, 21 bp, synthetic construct
  misc_feature 1..21: note = Artificial sequence related to HLA knockouts in cell therapy
  source 1..21: mol_type = other DNA
ctggagctgtggtcgctgctg

SEQ ID NO: 20809 - DNA, 21 bp, synthetic construct
  misc_feature 1..21: note = Artificial sequence related to HLA knockouts in cell therapy
  source 1..21: mol_type = other DNA
tggagctgtggtcgctgctgt

SEQ ID NO: 20810 - DNA, 21 bp, synthetic construct
  misc_feature 1..21: note = Artificial sequence related to HLA knockouts in cell therapy
  source 1..21: mol_type = other DNA
ggagctgtggtcgctgctgtg

SEQ ID NO: 20811 - DNA, 21 bp, synthetic construct
  misc_feature 1..21: note = Artificial sequence related to HLA knockouts in cell therapy
  source 1..21: mol_type = other DNA
gagctgtggtcgctgctgtga

SEQ ID NO: 20812 - DNA, 21 bp, synthetic construct
  misc_feature 1..21: note = Artificial sequence related to HLA knockouts in cell therapy
  source 1..21: mol_type = other DNA
gctgtggtcgctgctgtgatg

SEQ ID NO: 20813 - DNA, 21 bp, synthetic construct
  misc_feature 1..21: note = Artificial sequence related to HLA knockouts in cell therapy
  source 1..21: mol_type = other DNA
gtggtcgctgctgtgatgtgg

SEQ ID NO: 20814 - DNA, 21 bp, synthetic construct
  misc_feature 1..21: note = Artificial sequence related to HLA knockouts in cell therapy
  source 1..21: mol_type = other DNA
ggtcgctgctgtgatgtggag

SEQ ID NO: 20815 - DNA, 21 bp, synthetic construct
  misc_feature 1..21: note = Artificial sequence related to HLA knockouts in cell therapy
  source 1..21: mol_type = other DNA
gtcgctgctgtgatgtggagg

SEQ ID NO: 20816 - DNA, 21 bp, synthetic construct
  misc_feature 1..21: note = Artificial sequence related to HLA knockouts in cell therapy
  source 1..21: mol_type = other DNA
cgctgctgtgatgtggaggag

SEQ ID NO: 20817 - DNA, 21 bp, synthetic construct
  misc_feature 1..21: note = Artificial sequence related to HLA knockouts in cell therapy
  source 1..21: mol_type = other DNA
gctgctgtgatgtggaggagg

SEQ ID NO: 20818 - DNA, 21 bp, synthetic construct
  misc_feature 1..21: note = Artificial sequence related to HLA knockouts in cell therapy
  source 1..21: mol_type = other DNA
aggagggagctactctcaggc

SEQ ID NO: 20819 - DNA, 21 bp, synthetic construct
  misc_feature 1..21: note = Artificial sequence related to HLA knockouts in cell therapy
  source 1..21: mol_type = other DNA
ggagggagctactctcaggct

SEQ ID NO: 20820 - DNA, 21 bp, synthetic construct
  misc_feature 1..21: note = Artificial sequence related to HLA knockouts in cell therapy
  source 1..21: mol_type = other DNA
gagggagctactctcaggctg

SEQ ID NO: 20821 - DNA, 21 bp, synthetic construct
  misc_feature 1..21: note = Artificial sequence related to HLA knockouts in cell therapy
  source 1..21: mol_type = other DNA
agggagctactctcaggctgc

SEQ ID NO: 20822 - DNA, 21 bp, synthetic construct
  misc_feature 1..21: note = Artificial sequence related to HLA knockouts in cell therapy
  source 1..21: mol_type = other DNA
gggagctactctcaggctgca

SEQ ID NO: 20823 - DNA, 21 bp, synthetic construct
  misc_feature 1..21: note = Artificial sequence related to HLA knockouts in cell therapy
  source 1..21: mol_type = other DNA
ggctgcaagcagtgacagtgc

SEQ ID NO: 20824 - DNA, 21 bp, synthetic construct
  misc_feature 1..21: note = Artificial sequence related to HLA knockouts in cell therapy
  source 1..21: mol_type = other DNA
gctgcaagcagtgacagtgcc

SEQ ID NO: 20825 - DNA, 21 bp, synthetic construct
  misc_feature 1..21: note = Artificial sequence related to HLA knockouts in cell therapy
  source 1..21: mol_type = other DNA
ctgcaagcagtgacagtgccc

SEQ ID NO: 20826 - DNA, 21 bp, synthetic construct
  misc_feature 1..21: note = Artificial sequence related to HLA knockouts in cell therapy
  source 1..21: mol_type = other DNA
gcaagcagtgacagtgcccag

SEQ ID NO: 20827 - DNA, 21 bp, synthetic construct
  misc_feature 1..21: note = Artificial sequence related to HLA knockouts in cell therapy
  source 1..21: mol_type = other DNA
caagcagtgacagtgcccagg

SEQ ID NO: 20828 - DNA, 21 bp, synthetic construct
  misc_feature 1..21: note = Artificial sequence related to HLA knockouts in cell therapy
  source 1..21: mol_type = other DNA
aagcagtgacagtgcccaggg

SEQ ID NO: 20829 - DNA, 21 bp, synthetic construct
  misc_feature 1..21: note = Artificial sequence related to HLA knockouts in cell therapy
  source 1..21: mol_type = other DNA
agcagtgacagtgcccagggc

SEQ ID NO: 20830 - DNA, 21 bp, synthetic construct
  misc_feature 1..21: note = Artificial sequence related to HLA knockouts in cell therapy
  source 1..21: mol_type = other DNA
gcagtgacagtgcccagggct

SEQ ID NO: 20831 - DNA, 21 bp, synthetic construct
  misc_feature 1..21: note = Artificial sequence related to HLA knockouts in cell therapy
  source 1..21: mol_type = other DNA
cagtgacagtgcccagggctc

SEQ ID NO: 20832 - DNA, 21 bp, synthetic construct
  misc_feature 1..21: note = Artificial sequence related to HLA knockouts in cell therapy
  source 1..21: mol_type = other DNA
agtgacagtgcccagggctct

SEQ ID NO: 20833 - DNA, 21 bp, synthetic construct
  misc_feature 1..21: note = Artificial sequence related to HLA knockouts in cell therapy
  source 1..21: mol_type = other DNA
gtgacagtgcccagggctctg

SEQ ID NO: 20834 - DNA, 21 bp, synthetic construct
  misc_feature 1..21: note = Artificial sequence related to HLA knockouts in cell therapy
  source 1..21: mol_type = other DNA
tgacagtgcccagggctctga

SEQ ID NO: 20835 - DNA, 21 bp, synthetic construct
  misc_feature 1..21: note = Artificial sequence related to HLA knockouts in cell therapy
  source 1..21: mol_type = other DNA
gacagtgcccagggctctgat

SEQ ID NO: 20836 - DNA, 21 bp, synthetic construct
  misc_feature 1..21: note = Artificial sequence related to HLA knockouts in cell therapy
  source 1..21: mol_type = other DNA
acagtgcccagggctctgatg

SEQ ID NO: 20837 - DNA, 21 bp, synthetic construct
  misc_feature 1..21: note = Artificial sequence related to HLA knockouts in cell therapy
  source 1..21: mol_type = other DNA
cagtgcccagggctctgatgt

SEQ ID NO: 20838 - DNA, 21 bp, synthetic construct
  misc_feature 1..21: note = Artificial sequence related to HLA knockouts in cell therapy
  source 1..21: mol_type = other DNA
agtgcccagggctctgatgtg

SEQ ID NO: 20839 - DNA, 21 bp, synthetic construct
  misc_feature 1..21: note = Artificial sequence related to HLA knockouts in cell therapy
  source 1..21: mol_type = other DNA
gtgcccagggctctgatgtgt

SEQ ID NO: 20840 - DNA, 21 bp, synthetic construct
  misc_feature 1..21: note = Artificial sequence related to HLA knockouts in cell therapy
  source 1..21: mol_type = other DNA
tgcccagggctctgatgtgtc

SEQ ID NO: 20841 - DNA, 21 bp, synthetic construct
  misc_feature 1..21: note = Artificial sequence related to HLA knockouts in cell therapy
  source 1..21: mol_type = other DNA
gcccagggctctgatgtgtct

SEQ ID NO: 20842 - DNA, 21 bp, synthetic construct
  misc_feature 1..21: note = Artificial sequence related to HLA knockouts in cell therapy
  source 1..21: mol_type = other DNA
cccagggctctgatgtgtctc

SEQ ID NO: 20843 - DNA, 21 bp, synthetic construct
  misc_feature 1..21: note = Artificial sequence related to HLA knockouts in cell therapy
  source 1..21: mol_type = other DNA
gagacagctgccttgtgtggg

SEQ ID NO: 20844 - DNA, 21 bp, synthetic construct
  misc_feature 1..21: note = Artificial sequence related to HLA knockouts in cell therapy
  source 1..21: mol_type = other DNA
gacagctgccttgtgtgggac

SEQ ID NO: 20845 - DNA, 21 bp, synthetic construct
  misc_feature 1..21: note = Artificial sequence related to HLA knockouts in cell therapy
  source 1..21: mol_type = other DNA
cagctgccttgtgtgggactg

SEQ ID NO: 20846 - DNA, 21 bp, synthetic construct
  misc_feature 1..21: note = Artificial sequence related to HLA knockouts in cell therapy
  source 1..21: mol_type = other DNA
gctgccttgtgtgggactgag

SEQ ID NO: 20847 - DNA, 21 bp, synthetic construct
  misc_feature 1..21: note = Artificial sequence related to HLA knockouts in cell therapy
  source 1..21: mol_type = other DNA
gccttgtgtgggactgagagg

SEQ ID NO: 20848 - DNA, 21 bp, synthetic construct
  misc_feature 1..21: note = Artificial sequence related to HLA knockouts in cell therapy
  source 1..21: mol_type = other DNA
ccttgtgtgggactgagaggc

SEQ ID NO: 20849 - DNA, 21 bp, synthetic construct
  misc_feature 1..21: note = Artificial sequence related to HLA knockouts in cell therapy
  source 1..21: mol_type = other DNA
atgtgaggaggtggggagacc

SEQ ID NO: 20850 - DNA, 21 bp, synthetic construct
  misc_feature 1..21: note = Artificial sequence related to HLA knockouts in cell therapy
  source 1..21: mol_type = other DNA
tgtgaggaggtggggagacca

SEQ ID NO: 20851 - DNA, 21 bp, synthetic construct
  misc_feature 1..21: note = Artificial sequence related to HLA knockouts in cell therapy
  source 1..21: mol_type = other DNA
gtgaggaggtggggagaccac

SEQ ID NO: 20852 - DNA, 21 bp, synthetic construct
  misc_feature 1..21: note = Artificial sequence related to HLA knockouts in cell therapy
  source 1..21: mol_type = other DNA
tgaggaggtggggagaccacc

SEQ ID NO: 20853 - DNA, 21 bp, synthetic construct
  misc_feature 1..21: note = Artificial sequence related to HLA knockouts in cell therapy
  source 1..21: mol_type = other DNA
gaggaggtggggagaccaccc

SEQ ID NO: 20854 - DNA, 21 bp, synthetic construct
  misc_feature 1..21: note = Artificial sequence related to HLA knockouts in cell therapy
  source 1..21: mol_type = other DNA
aggaggtggggagaccacccc

SEQ ID NO: 20855 - DNA, 21 bp, synthetic construct
  misc_feature 1..21: note = Artificial sequence related to HLA knockouts in cell therapy
  source 1..21: mol_type = other DNA
ggaggtggggagaccacccca

SEQ ID NO: 20856 - DNA, 21 bp, synthetic construct
  misc_feature 1..21: note = Artificial sequence related to HLA knockouts in cell therapy
  source 1..21: mol_type = other DNA
gaggtggggagaccaccccac

SEQ ID NO: 20857 - DNA, 21 bp, synthetic construct
  misc_feature 1..21: note = Artificial sequence related to HLA knockouts in cell therapy
  source 1..21: mol_type = other DNA
aggtggggagaccaccccacc

SEQ ID NO: 20858 - DNA, 21 bp, synthetic construct
  misc_feature 1..21: note = Artificial sequence related to HLA knockouts in cell therapy
  source 1..21: mol_type = other DNA
ggtggggagaccaccccaccc

SEQ ID NO: 20859 - DNA, 21 bp, synthetic construct
  misc_feature 1..21: note = Artificial sequence related to HLA knockouts in cell therapy
  source 1..21: mol_type = other DNA
gtggggagaccaccccacccc

SEQ ID NO: 20860 - DNA, 21 bp, synthetic construct
  misc_feature 1..21: note = Artificial sequence related to HLA knockouts in cell therapy
  source 1..21: mol_type = other DNA
tggggagaccaccccaccccc

SEQ ID NO: 20861 - DNA, 21 bp, synthetic construct
  misc_feature 1..21: note = Artificial sequence related to HLA knockouts in cell therapy
  source 1..21: mol_type = other DNA
ggggagaccaccccaccccca

SEQ ID NO: 20862 - DNA, 21 bp, synthetic construct
  misc_feature 1..21: note = Artificial sequence related to HLA knockouts in cell therapy
  source 1..21: mol_type = other DNA
gggagaccaccccacccccat

SEQ ID NO: 20863 - DNA, 21 bp, synthetic construct
  misc_feature 1..21: note = Artificial sequence related to HLA knockouts in cell therapy
  source 1..21: mol_type = other DNA
ggagaccaccccacccccatg

SEQ ID NO: 20864 - DNA, 21 bp, synthetic construct
  misc_feature 1..21: note = Artificial sequence related to HLA knockouts in cell therapy
  source 1..21: mol_type = other DNA
gagaccaccccacccccatgt

SEQ ID NO: 20865 - DNA, 21 bp, synthetic construct
  misc_feature 1..21: note = Artificial sequence related to HLA knockouts in cell therapy
  source 1..21: mol_type = other DNA
agaccaccccacccccatgtc

SEQ ID NO: 20866 - DNA, 21 bp, synthetic construct
  misc_feature 1..21: note = Artificial sequence related to HLA knockouts in cell therapy
  source 1..21: mol_type = other DNA
gaccaccccacccccatgtcc

SEQ ID NO: 20867 - DNA, 21 bp, synthetic construct
  misc_feature 1..21: note = Artificial sequence related to HLA knockouts in cell therapy
  source 1..21: mol_type = other DNA
accaccccacccccatgtcca

SEQ ID NO: 20868 - DNA, 21 bp, synthetic construct
  misc_feature 1..21: note = Artificial sequence related to HLA knockouts in cell therapy
  source 1..21: mol_type = other DNA
ccaccccacccccatgtccac

SEQ ID NO: 20869 - DNA, 21 bp, synthetic construct
  misc_feature 1..21: note = Artificial sequence related to HLA knockouts in cell therapy
  source 1..21: mol_type = other DNA
caccccacccccatgtccacc

SEQ ID NO: 20870 - DNA, 21 bp, synthetic construct
  misc_feature 1..21: note = Artificial sequence related to HLA knockouts in cell therapy
  source 1..21: mol_type = other DNA
accccacccccatgtccacca

SEQ ID NO: 20871 - DNA, 21 bp, synthetic construct
  misc_feature 1..21: note = Artificial sequence related to HLA knockouts in cell therapy
  source 1..21: mol_type = other DNA
ccccacccccatgtccaccat

SEQ ID NO: 20872 - DNA, 21 bp, synthetic construct
  misc_feature 1..21: note = Artificial sequence related to HLA knockouts in cell therapy
  source 1..21: mol_type = other DNA
cccacccccatgtccaccatg

SEQ ID NO: 20873 - DNA, 21 bp, synthetic construct
  misc_feature 1..21: note = Artificial sequence related to HLA knockouts in cell therapy
  source 1..21: mol_type = other DNA
ccacccccatgtccaccatga

SEQ ID NO: 20874 - DNA, 21 bp, synthetic construct
  misc_feature 1..21: note = Artificial sequence related to HLA knockouts in cell therapy
  source 1..21: mol_type = other DNA
cacccccatgtccaccatgac

SEQ ID NO: 20875 - DNA, 21 bp, synthetic construct
  misc_feature 1..21: note = Artificial sequence related to HLA knockouts in cell therapy
  source 1..21: mol_type = other DNA
acccccatgtccaccatgacc

SEQ ID NO: 20876 - DNA, 21 bp, synthetic construct
  misc_feature 1..21: note = Artificial sequence related to HLA knockouts in cell therapy
  source 1..21: mol_type = other DNA
cccccatgtccaccatgaccc

SEQ ID NO: 20877 - DNA, 21 bp, synthetic construct
  misc_feature 1..21: note = Artificial sequence related to HLA knockouts in cell therapy
  source 1..21: mol_type = other DNA
ccccatgtccaccatgaccct

SEQ ID NO: 20878 - DNA, 21 bp, synthetic construct
  misc_feature 1..21: note = Artificial sequence related to HLA knockouts in cell therapy
  source 1..21: mol_type = other DNA
cccatgtccaccatgaccctc

SEQ ID NO: 20879 - DNA, 21 bp, synthetic construct
  misc_feature 1..21: note = Artificial sequence related to HLA knockouts in cell therapy
  source 1..21: mol_type = other DNA
gtccaccatgaccctcttccc

SEQ ID NO: 20880 - DNA, 21 bp, synthetic construct
  misc_feature 1..21: note = Artificial sequence related to HLA knockouts in cell therapy
  source 1..21: mol_type = other DNA
ccaccatgaccctcttcccac

SEQ ID NO: 20881 - DNA, 21 bp, synthetic construct
  misc_feature 1..21: note = Artificial sequence related to HLA knockouts in cell therapy
  source 1..21: mol_type = other DNA
caccatgaccctcttcccacg

SEQ ID NO: 20882 - DNA, 21 bp, synthetic construct
  misc_feature 1..21: note = Artificial sequence related to HLA knockouts in cell therapy
  source 1..21: mol_type = other DNA
accatgaccctcttcccacgc

SEQ ID NO: 20883 - DNA, 21 bp, synthetic construct
  misc_feature 1..21: note = Artificial sequence related to HLA knockouts in cell therapy
  source 1..21: mol_type = other DNA
ccatgaccctcttcccacgct

SEQ ID NO: 20884 - DNA, 21 bp, synthetic construct
  misc_feature 1..21: note = Artificial sequence related to HLA knockouts in cell therapy
  source 1..21: mol_type = other DNA
catgaccctcttcccacgctg

SEQ ID NO: 20885 - DNA, 21 bp, synthetic construct
  misc_feature 1..21: note = Artificial sequence related to HLA knockouts in cell therapy
  source 1..21: mol_type = other DNA
tgaccctcttcccacgctgac

SEQ ID NO: 20886 - DNA, 21 bp, synthetic construct
  misc_feature 1..21: note = Artificial sequence related to HLA knockouts in cell therapy
  source 1..21: mol_type = other DNA
gaccctcttcccacgctgacc

SEQ ID NO: 20887 - DNA, 21 bp, synthetic construct
  misc_feature 1..21: note = Artificial sequence related to HLA knockouts in cell therapy
  source 1..21: mol_type = other DNA
accctcttcccacgctgacct

SEQ ID NO: 20888 - DNA, 21 bp, synthetic construct
  misc_feature 1..21: note = Artificial sequence related to HLA knockouts in cell therapy
  source 1..21: mol_type = other DNA
ccctcttcccacgctgacctg

SEQ ID NO: 20889 - DNA, 21 bp, synthetic construct
  misc_feature 1..21: note = Artificial sequence related to HLA knockouts in cell therapy
  source 1..21: mol_type = other DNA
cctcttcccacgctgacctgt

SEQ ID NO: 20890 - DNA, 21 bp, synthetic construct
  misc_feature 1..21: note = Artificial sequence related to HLA knockouts in cell therapy
  source 1..21: mol_type = other DNA
ctcttcccacgctgacctgtg

SEQ ID NO: 20891 - DNA, 21 bp, synthetic construct
  misc_feature 1..21: note = Artificial sequence related to HLA knockouts in cell therapy
  source 1..21: mol_type = other DNA
tcttcccacgctgacctgtgc

SEQ ID NO: 20892 - DNA, 21 bp, synthetic construct
  misc_feature 1..21: note = Artificial sequence related to HLA knockouts in cell therapy
  source 1..21: mol_type = other DNA
cttcccacgctgacctgtgct

SEQ ID NO: 20893 - DNA, 21 bp, synthetic construct
  misc_feature 1..21: note = Artificial sequence related to HLA knockouts in cell therapy
  source 1..21: mol_type = other DNA
ttcccacgctgacctgtgctc

SEQ ID NO: 20894 - DNA, 21 bp, synthetic construct
  misc_feature 1..21: note = Artificial sequence related to HLA knockouts in cell therapy
  source 1..21: mol_type = other DNA
tcccacgctgacctgtgctcc

SEQ ID NO: 20895 - DNA, 21 bp, synthetic construct
  misc_feature 1..21: note = Artificial sequence related to HLA knockouts in cell therapy
  source 1..21: mol_type = other DNA
cccacgctgacctgtgctccc

SEQ ID NO: 20896 - DNA, 21 bp, synthetic construct
  misc_feature 1..21: note = Artificial sequence related to HLA knockouts in cell therapy
  source 1..21: mol_type = other DNA
ccacgctgacctgtgctccct

SEQ ID NO: 20897 - DNA, 21 bp, synthetic construct
  misc_feature 1..21: note = Artificial sequence related to HLA knockouts in cell therapy
  source 1..21: mol_type = other DNA
cacgctgacctgtgctccctc

SEQ ID NO: 20898 - DNA, 21 bp, synthetic construct
  misc_feature 1..21: note = Artificial sequence related to HLA knockouts in cell therapy
  source 1..21: mol_type = other DNA
acgctgacctgtgctccctcc

SEQ ID NO: 20899 - DNA, 21 bp, synthetic construct
  misc_feature 1..21: note = Artificial sequence related to HLA knockouts in cell therapy
  source 1..21: mol_type = other DNA
cgctgacctgtgctccctccc

SEQ ID NO: 20900 - DNA, 21 bp, synthetic construct
  misc_feature 1..21: note = Artificial sequence related to HLA knockouts in cell therapy
  source 1..21: mol_type = other DNA
gctgacctgtgctccctcccc

SEQ ID NO: 20901 - DNA, 21 bp, synthetic construct
  misc_feature 1..21: note = Artificial sequence related to HLA knockouts in cell therapy
  source 1..21: mol_type = other DNA
ctgacctgtgctccctcccca

SEQ ID NO: 20902 - DNA, 21 bp, synthetic construct
  misc_feature 1..21: note = Artificial sequence related to HLA knockouts in cell therapy
  source 1..21: mol_type = other DNA
tgacctgtgctccctccccaa

SEQ ID NO: 20903 - DNA, 21 bp, synthetic construct
  misc_feature 1..21: note = Artificial sequence related to HLA knockouts in cell therapy
  source 1..21: mol_type = other DNA
gacctgtgctccctccccaat

SEQ ID NO: 20904 - DNA, 21 bp, synthetic construct
  misc_feature 1..21: note = Artificial sequence related to HLA knockouts in cell therapy
  source 1..21: mol_type = other DNA
acctgtgctccctccccaatc

SEQ ID NO: 20905 - DNA, 21 bp, synthetic construct
  misc_feature 1..21: note = Artificial sequence related to HLA knockouts in cell therapy
  source 1..21: mol_type = other DNA
cctgtgctccctccccaatca

SEQ ID NO: 20906 - DNA, 21 bp, synthetic construct
  misc_feature 1..21: note = Artificial sequence related to HLA knockouts in cell therapy
  source 1..21: mol_type = other DNA
tcctgttccagagaggtgggg

SEQ ID NO: 20907 - DNA, 21 bp, synthetic construct
  misc_feature 1..21: note = Artificial sequence related to HLA knockouts in cell therapy
  source 1..21: mol_type = other DNA
cctgttccagagaggtggggc

SEQ ID NO: 20908 - DNA, 21 bp, synthetic construct
  misc_feature 1..21: note = Artificial sequence related to HLA knockouts in cell therapy
  source 1..21: mol_type = other DNA
ctgttccagagaggtggggct

SEQ ID NO: 20909 - DNA, 21 bp, synthetic construct
  misc_feature 1..21: note = Artificial sequence related to HLA knockouts in cell therapy
  source 1..21: mol_type = other DNA
tgttccagagaggtggggctg

SEQ ID NO: 20910 - DNA, 21 bp, synthetic construct
  misc_feature 1..21: note = Artificial sequence related to HLA knockouts in cell therapy
  source 1..21: mol_type = other DNA
gttccagagaggtggggctga

SEQ ID NO: 20911 - DNA, 21 bp, synthetic construct
  misc_feature 1..21: note = Artificial sequence related to HLA knockouts in cell therapy
  source 1..21: mol_type = other DNA
ttccagagaggtggggctgag

SEQ ID NO: 20912 - DNA, 21 bp, synthetic construct
  misc_feature 1..21: note = Artificial sequence related to HLA knockouts in cell therapy
  source 1..21: mol_type = other DNA
tccagagaggtggggctgagg

SEQ ID NO: 20913 - DNA, 21 bp, synthetic construct
  misc_feature 1..21: note = Artificial sequence related to HLA knockouts in cell therapy
  source 1..21: mol_type = other DNA
ccagagaggtggggctgaggt

SEQ ID NO: 20914 - DNA, 21 bp, synthetic construct
  misc_feature 1..21: note = Artificial sequence related to HLA knockouts in cell therapy
  source 1..21: mol_type = other DNA
cagagaggtggggctgaggtg

SEQ ID NO: 20915 - DNA, 21 bp, synthetic construct
  misc_feature 1..21: note = Artificial sequence related to HLA knockouts in cell therapy
  source 1..21: mol_type = other DNA
agagaggtggggctgaggtgt

SEQ ID NO: 20916 - DNA, 21 bp, synthetic construct
  misc_feature 1..21: note = Artificial sequence related to HLA knockouts in cell therapy
  source 1..21: mol_type = other DNA
gagaggtggggctgaggtgtc

SEQ ID NO: 20917 - DNA, 21 bp, synthetic construct
  misc_feature 1..21: note = Artificial sequence related to HLA knockouts in cell therapy
  source 1..21: mol_type = other DNA
agaggtggggctgaggtgtct

SEQ ID NO: 20918 - DNA, 21 bp, synthetic construct
  misc_feature 1..21: note = Artificial sequence related to HLA knockouts in cell therapy
  source 1..21: mol_type = other DNA
gaggtggggctgaggtgtctc

SEQ ID NO: 20919 - DNA, 21 bp, synthetic construct
  misc_feature 1..21: note = Artificial sequence related to HLA knockouts in cell therapy
  source 1..21: mol_type = other DNA
aggtggggctgaggtgtctcc

SEQ ID NO: 20920 - DNA, 21 bp, synthetic construct
  misc_feature 1..21: note = Artificial sequence related to HLA knockouts in cell therapy
  source 1..21: mol_type = other DNA
ggtggggctgaggtgtctcca

SEQ ID NO: 20921 - DNA, 21 bp, synthetic construct
  misc_feature 1..21: note = Artificial sequence related to HLA knockouts in cell therapy
  source 1..21: mol_type = other DNA
gtggggctgaggtgtctccat

SEQ ID NO: 20922 - DNA, 21 bp, synthetic construct
  misc_feature 1..21: note = Artificial sequence related to HLA knockouts in cell therapy
  source 1..21: mol_type = other DNA
tggggctgaggtgtctccatc

SEQ ID NO: 20923 - DNA, 21 bp, synthetic construct
  misc_feature 1..21: note = Artificial sequence related to HLA knockouts in cell therapy
  source 1..21: mol_type = other DNA
ggggctgaggtgtctccatct

SEQ ID NO: 20924 - DNA, 21 bp, synthetic construct
  misc_feature 1..21: note = Artificial sequence related to HLA knockouts in cell therapy
  source 1..21: mol_type = other DNA
gggctgaggtgtctccatctc

SEQ ID NO: 20925 - DNA, 22 bp, synthetic construct
  misc_feature 1..22: note = Artificial sequence related to HLA knockouts in cell therapy
  source 1..22: mol_type = other DNA
cagaagcagaggggtcagggcg

SEQ ID NO: 20926 - DNA, 22 bp, synthetic construct
  misc_feature 1..22: note = Artificial sequence related to HLA knockouts in cell therapy
  source 1..22: mol_type = other DNA
agaagcagaggggtcagggcga

SEQ ID NO: 20927 - DNA, 22 bp, synthetic construct
  misc_feature 1..22: note = Artificial sequence related to HLA knockouts in cell therapy
  source 1..22: mol_type = other DNA
gaagcagaggggtcagggcgaa

SEQ ID NO: 20928 - DNA, 22 bp, synthetic construct
  misc_feature 1..22: note = Artificial sequence related to HLA knockouts in cell therapy
  source 1..22: mol_type = other DNA
aagcagaggggtcagggcgaag

SEQ ID NO: 20929 - DNA, 22 bp, synthetic construct
  misc_feature 1..22: note = Artificial sequence related to HLA knockouts in cell therapy
  source 1..22: mol_type = other DNA
agcagaggggtcagggcgaagt

SEQ ID NO: 20930 - DNA, 22 bp, synthetic construct
  misc_feature 1..22: note = Artificial sequence related to HLA knockouts in cell therapy
  source 1..22: mol_type = other DNA
gcagaggggtcagggcgaagtc

SEQ ID NO: 20931 - DNA, 22 bp, synthetic construct
  misc_feature 1..22: note = Artificial sequence related to HLA knockouts in cell therapy
  source 1..22: mol_type = other DNA
cagaggggtcagggcgaagtcc

SEQ ID NO: 20932 - DNA, 22 bp, synthetic construct
  misc_feature 1..22: note = Artificial sequence related to HLA knockouts in cell therapy
  source 1..22: mol_type = other DNA
agaggggtcagggcgaagtccc

SEQ ID NO: 20933 - DNA, 22 bp, synthetic construct
  misc_feature 1..22: note = Artificial sequence related to HLA knockouts in cell therapy
  source 1..22: mol_type = other DNA
gaggggtcagggcgaagtccca

SEQ ID NO: 20934 - DNA, 22 bp, synthetic construct
  misc_feature 1..22: note = Artificial sequence related to HLA knockouts in cell therapy
  source 1..22: mol_type = other DNA
aggggtcagggcgaagtcccag

SEQ ID NO: 20935 - DNA, 22 bp, synthetic construct
  misc_feature 1..22: note = Artificial sequence related to HLA knockouts in cell therapy
  source 1..22: mol_type = other DNA
ggggtcagggcgaagtcccagg

SEQ ID NO: 20936 - DNA, 22 bp, synthetic construct
  misc_feature 1..22: note = Artificial sequence related to HLA knockouts in cell therapy
  source 1..22: mol_type = other DNA
gggtcagggcgaagtcccaggg

SEQ ID NO: 20937 - DNA, 22 bp, synthetic construct
  misc_feature 1..22: note = Artificial sequence related to HLA knockouts in cell therapy
  source 1..22: mol_type = other DNA
ggtcagggcgaagtcccagggc

SEQ ID NO: 20938 - DNA, 22 bp, synthetic construct
  misc_feature 1..22: note = Artificial sequence related to HLA knockouts in cell therapy
  source 1..22: mol_type = other DNA
gtcagggcgaagtcccagggcc

SEQ ID NO: 20939 - DNA, 22 bp, synthetic construct
  misc_feature 1..22: note = Artificial sequence related to HLA knockouts in cell therapy
  source 1..22: mol_type = other DNA
tcagggcgaagtcccagggccc

SEQ ID NO: 20940 - DNA, 22 bp, synthetic construct
  misc_feature 1..22: note = Artificial sequence related to HLA knockouts in cell therapy
  source 1..22: mol_type = other DNA
cagggcgaagtcccagggcccc

SEQ ID NO: 20941 - DNA, 22 bp, synthetic construct
  misc_feature 1..22: note = Artificial sequence related to HLA knockouts in cell therapy
  source 1..22: mol_type = other DNA
agggcgaagtcccagggcccca

SEQ ID NO: 20942 - DNA, 22 bp, synthetic construct
  misc_feature 1..22: note = Artificial sequence related to HLA knockouts in cell therapy
  source 1..22: mol_type = other DNA
gggcgaagtcccagggccccag

SEQ ID NO: 20943 - DNA, 22 bp, synthetic construct
  misc_feature 1..22: note = Artificial sequence related to HLA knockouts in cell therapy
  source 1..22: mol_type = other DNA
ggcgaagtcccagggccccagg

SEQ ID NO: 20944 - DNA, 22 bp, synthetic construct
  misc_feature 1..22: note = Artificial sequence related to HLA knockouts in cell therapy
  source 1..22: mol_type = other DNA
gcgaagtcccagggccccaggc

SEQ ID NO: 20945 - DNA, 22 bp, synthetic construct
  misc_feature 1..22: note = Artificial sequence related to HLA knockouts in cell therapy
  source 1..22: mol_type = other DNA
cgaagtcccagggccccaggcg

SEQ ID NO: 20946 - DNA, 22 bp, synthetic construct
  misc_feature 1..22: note = Artificial sequence related to HLA knockouts in cell therapy
  source 1..22: mol_type = other DNA
gaagtcccagggccccaggcgt

SEQ ID NO: 20947 - DNA, 22 bp, synthetic construct
  misc_feature 1..22: note = Artificial sequence related to HLA knockouts in cell therapy
  source 1..22: mol_type = other DNA
aagtcccagggccccaggcgtg

SEQ ID NO: 20948 - DNA, 22 bp, synthetic construct
  misc_feature 1..22: note = Artificial sequence related to HLA knockouts in cell therapy
  source 1..22: mol_type = other DNA
agtcccagggccccaggcgtgg

SEQ ID NO: 20949 - DNA, 22 bp, synthetic construct
  misc_feature 1..22: note = Artificial sequence related to HLA knockouts in cell therapy
  source 1..22: mol_type = other DNA
gtcccagggccccaggcgtggc

SEQ ID NO: 20950 - DNA, 22 bp, synthetic construct
  misc_feature 1..22: note = Artificial sequence related to HLA knockouts in cell therapy
  source 1..22: mol_type = other DNA
tcccagggccccaggcgtggct

SEQ ID NO: 20951 - DNA, 22 bp, synthetic construct
  misc_feature 1..22: note = Artificial sequence related to HLA knockouts in cell therapy
  source 1..22: mol_type = other DNA
cccagggccccaggcgtggctc

SEQ ID NO: 20952 - DNA, 22 bp, synthetic construct
  misc_feature 1..22: note = Artificial sequence related to HLA knockouts in cell therapy
  source 1..22: mol_type = other DNA
ccagggccccaggcgtggctct

SEQ ID NO: 20953 - DNA, 22 bp, synthetic construct
  misc_feature 1..22: note = Artificial sequence related to HLA knockouts in cell therapy
  source 1..22: mol_type = other DNA
cagggccccaggcgtggctctc

SEQ ID NO: 20954 - DNA, 22 bp, synthetic construct
  misc_feature 1..22: note = Artificial sequence related to HLA knockouts in cell therapy
  source 1..22: mol_type = other DNA
agggccccaggcgtggctctca

SEQ ID NO: 20955 - DNA, 22 bp, synthetic construct
  misc_feature 1..22: note = Artificial sequence related to HLA knockouts in cell therapy
  source 1..22: mol_type = other DNA
gggccccaggcgtggctctcag

SEQ ID NO: 20956 - DNA, 22 bp, synthetic construct
  misc_feature 1..22: note = Artificial sequence related to HLA knockouts in cell therapy
  source 1..22: mol_type = other DNA
ggccccaggcgtggctctcagg

SEQ ID NO: 20957 - DNA, 22 bp, synthetic construct
  misc_feature 1..22: note = Artificial sequence related to HLA knockouts in cell therapy
  source 1..22: mol_type = other DNA
gccccaggcgtggctctcaggg

SEQ ID NO: 20958 - DNA, 22 bp, synthetic construct
  misc_feature 1..22: note = Artificial sequence related to HLA knockouts in cell therapy
  source 1..22: mol_type = other DNA
ccccaggcgtggctctcagggt

SEQ ID NO: 20959 - DNA, 22 bp, synthetic construct
  misc_feature 1..22: note = Artificial sequence related to HLA knockouts in cell therapy
  source 1..22: mol_type = other DNA
cccaggcgtggctctcagggtc

SEQ ID NO: 20960 - DNA, 22 bp, synthetic construct
  misc_feature 1..22: note = Artificial sequence related to HLA knockouts in cell therapy
  source 1..22: mol_type = other DNA
ccaggcgtggctctcagggtct

SEQ ID NO: 20961 - DNA, 22 bp, synthetic construct
  misc_feature 1..22: note = Artificial sequence related to HLA knockouts in cell therapy
  source 1..22: mol_type = other DNA
caggcgtggctctcagggtctc

SEQ ID NO: 20962 - DNA, 22 bp, synthetic construct
  misc_feature 1..22: note = Artificial sequence related to HLA knockouts in cell therapy
  source 1..22: mol_type = other DNA
aggcgtggctctcagggtctca

SEQ ID NO: 20963 - DNA, 22 bp, synthetic construct
  misc_feature 1..22: note = Artificial sequence related to HLA knockouts in cell therapy
  source 1..22: mol_type = other DNA
ggcgtggctctcagggtctcag

SEQ ID NO: 20964 - DNA, 22 bp, synthetic construct
  misc_feature 1..22: note = Artificial sequence related to HLA knockouts in cell therapy
  source 1..22: mol_type = other DNA
gcgtggctctcagggtctcagg

SEQ ID NO: 20965 - DNA, 22 bp, synthetic construct
  misc_feature 1..22: note = Artificial sequence related to HLA knockouts in cell therapy
  source 1..22: mol_type = other DNA
cgtggctctcagggtctcaggc

SEQ ID NO: 20966 - DNA, 22 bp, synthetic construct
  misc_feature 1..22: note = Artificial sequence related to HLA knockouts in cell therapy
  source 1..22: mol_type = other DNA
gtggctctcagggtctcaggcc

SEQ ID NO: 20967 - DNA, 22 bp, synthetic construct
  misc_feature 1..22: note = Artificial sequence related to HLA knockouts in cell therapy
  source 1..22: mol_type = other DNA
tggctctcagggtctcaggccc

SEQ ID NO: 20968 - DNA, 22 bp, synthetic construct
  misc_feature 1..22: note = Artificial sequence related to HLA knockouts in cell therapy
  source 1..22: mol_type = other DNA
ggctctcagggtctcaggcccc

SEQ ID NO: 20969 - DNA, 22 bp, synthetic construct
  misc_feature 1..22: note = Artificial sequence related to HLA knockouts in cell therapy
  source 1..22: mol_type = other DNA
gctctcagggtctcaggccccg

SEQ ID NO: 20970 - DNA, 22 bp, synthetic construct
  misc_feature 1..22: note = Artificial sequence related to HLA knockouts in cell therapy
  source 1..22: mol_type = other DNA
ctctcagggtctcaggccccga

SEQ ID NO: 20971 - DNA, 22 bp, synthetic construct
  misc_feature 1..22: note = Artificial sequence related to HLA knockouts in cell therapy
  source 1..22: mol_type = other DNA
tctcagggtctcaggccccgaa

SEQ ID NO: 20972 - DNA, 22 bp, synthetic construct
  misc_feature 1..22: note = Artificial sequence related to HLA knockouts in cell therapy
  source 1..22: mol_type = other DNA
ctcagggtctcaggccccgaag

SEQ ID NO: 20973 - DNA, 22 bp, synthetic construct
  misc_feature 1..22: note = Artificial sequence related to HLA knockouts in cell therapy
  source 1..22: mol_type = other DNA
tcagggtctcaggccccgaagg

SEQ ID NO: 20974 - DNA, 22 bp, synthetic construct
  misc_feature 1..22: note = Artificial sequence related to HLA knockouts in cell therapy
  source 1..22: mol_type = other DNA
cagggtctcaggccccgaaggc

SEQ ID NO: 20975 - DNA, 22 bp, synthetic construct
  misc_feature 1..22: note = Artificial sequence related to HLA knockouts in cell therapy
  source 1..22: mol_type = other DNA
agggtctcaggccccgaaggcg

SEQ ID NO: 20976 - DNA, 22 bp, synthetic construct
  misc_feature 1..22: note = Artificial sequence related to HLA knockouts in cell therapy
  source 1..22: mol_type = other DNA
gggtctcaggccccgaaggcgg

SEQ ID NO: 20977 - DNA, 22 bp, synthetic construct
  misc_feature 1..22: note = Artificial sequence related to HLA knockouts in cell therapy
  source 1..22: mol_type = other DNA
ggtctcaggccccgaaggcggt

SEQ ID NO: 20978 - DNA, 22 bp, synthetic construct
  misc_feature 1..22: note = Artificial sequence related to HLA knockouts in cell therapy
  source 1..22: mol_type = other DNA
gtctcaggccccgaaggcggtg

SEQ ID NO: 20979 - DNA, 22 bp, synthetic construct
  misc_feature 1..22: note = Artificial sequence related to HLA knockouts in cell therapy
  source 1..22: mol_type = other DNA
tctcaggccccgaaggcggtgt

SEQ ID NO: 20980 - DNA, 22 bp, synthetic construct
  misc_feature 1..22: note = Artificial sequence related to HLA knockouts in cell therapy
  source 1..22: mol_type = other DNA
ctcaggccccgaaggcggtgta

SEQ ID NO: 20981 - DNA, 22 bp, synthetic construct
  misc_feature 1..22: note = Artificial sequence related to HLA knockouts in cell therapy
  source 1..22: mol_type = other DNA
tcaggccccgaaggcggtgtat

SEQ ID NO: 20982 - DNA, 22 bp, synthetic construct
  misc_feature 1..22: note = Artificial sequence related to HLA knockouts in cell therapy
  source 1..22: mol_type = other DNA
caggccccgaaggcggtgtatg

SEQ ID NO: 20983 - DNA, 22 bp, synthetic construct
  misc_feature 1..22: note = Artificial sequence related to HLA knockouts in cell therapy
  source 1..22: mol_type = other DNA
aggccccgaaggcggtgtatgg

SEQ ID NO: 20984 - DNA, 22 bp, synthetic construct
  misc_feature 1..22: note = Artificial sequence related to HLA knockouts in cell therapy
  source 1..22: mol_type = other DNA
ggccccgaaggcggtgtatgga

SEQ ID NO: 20985 - DNA, 22 bp, synthetic construct
  misc_feature 1..22: note = Artificial sequence related to HLA knockouts in cell therapy
  source 1..22: mol_type = other DNA
gccccgaaggcggtgtatggat

SEQ ID NO: 20986 - DNA, 22 bp, synthetic construct
  misc_feature 1..22: note = Artificial sequence related to HLA knockouts in cell therapy
  source 1..22: mol_type = other DNA
ggattggggagtcccagccttg

SEQ ID NO: 20987 - DNA, 22 bp, synthetic construct
  misc_feature 1..22: note = Artificial sequence related to HLA knockouts in cell therapy
  source 1..22: mol_type = other DNA
gattggggagtcccagccttgg

SEQ ID NO: 20988 - DNA, 22 bp, synthetic construct
  misc_feature 1..22: note = Artificial sequence related to HLA knockouts in cell therapy
  source 1..22: mol_type = other DNA
attggggagtcccagccttggg

SEQ ID NO: 20989 - DNA, 22 bp, synthetic construct
  misc_feature 1..22: note = Artificial sequence related to HLA knockouts in cell therapy
  source 1..22: mol_type = other DNA
ttggggagtcccagccttgggg

SEQ ID NO: 20990 - DNA, 22 bp, synthetic construct
  misc_feature 1..22: note = Artificial sequence related to HLA knockouts in cell therapy
  source 1..22: mol_type = other DNA
tggggagtcccagccttgggga

SEQ ID NO: 20991 - DNA, 22 bp, synthetic construct
  misc_feature 1..22: note = Artificial sequence related to HLA knockouts in cell therapy
  source 1..22: mol_type = other DNA
ggggagtcccagccttggggat

SEQ ID NO: 20992 - DNA, 22 bp, synthetic construct
  misc_feature 1..22: note = Artificial sequence related to HLA knockouts in cell therapy
  source 1..22: mol_type = other DNA
gggagtcccagccttggggatt

SEQ ID NO: 20993 - DNA, 22 bp, synthetic construct
  misc_feature 1..22: note = Artificial sequence related to HLA knockouts in cell therapy
  source 1..22: mol_type = other DNA
ggagtcccagccttggggattc

SEQ ID NO: 20994 - DNA, 22 bp, synthetic construct
  misc_feature 1..22: note = Artificial sequence related to HLA knockouts in cell therapy
  source 1..22: mol_type = other DNA
gagtcccagccttggggattcc

SEQ ID NO: 20995 - DNA, 22 bp, synthetic construct
  misc_feature 1..22: note = Artificial sequence related to HLA knockouts in cell therapy
  source 1..22: mol_type = other DNA
agtcccagccttggggattccc

SEQ ID NO: 20996 - DNA, 22 bp, synthetic construct
  misc_feature 1..22: note = Artificial sequence related to HLA knockouts in cell therapy
  source 1..22: mol_type = other DNA
gtcccagccttggggattcccc

SEQ ID NO: 20997 - DNA, 22 bp, synthetic construct
  misc_feature 1..22: note = Artificial sequence related to HLA knockouts in cell therapy
  source 1..22: mol_type = other DNA
tcccagccttggggattcccca

SEQ ID NO: 20998 - DNA, 22 bp, synthetic construct
  misc_feature 1..22: note = Artificial sequence related to HLA knockouts in cell therapy
  source 1..22: mol_type = other DNA
cccagccttggggattccccaa

SEQ ID NO: 20999 - DNA, 22 bp, synthetic construct
  misc_feature 1..22: note = Artificial sequence related to HLA knockouts in cell therapy
  source 1..22: mol_type = other DNA
ccagccttggggattccccaac

SEQ ID NO: 21000 - DNA, 22 bp, synthetic construct
  misc_feature 1..22: note = Artificial sequence related to HLA knockouts in cell therapy
  source 1..22: mol_type = other DNA
gccttggggattccccaactcc

SEQ ID NO: 21001 - DNA, 22 bp, synthetic construct
  misc_feature 1..22: note = Artificial sequence related to HLA knockouts in cell therapy
  source 1..22: mol_type = other DNA
ccttggggattccccaactccg

SEQ ID NO: 21002 - DNA, 22 bp, synthetic construct
  misc_feature 1..22: note = Artificial sequence related to HLA knockouts in cell therapy
  source 1..22: mol_type = other DNA
cttggggattccccaactccgc

SEQ ID NO: 21003 - DNA, 22 bp, synthetic construct
  misc_feature 1..22: note = Artificial sequence related to HLA knockouts in cell therapy
  source 1..22: mol_type = other DNA
tggggattccccaactccgcag

SEQ ID NO: 21004 - DNA, 22 bp, synthetic construct
  misc_feature 1..22: note = Artificial sequence related to HLA knockouts in cell therapy
  source 1..22: mol_type = other DNA
ggggattccccaactccgcagt

SEQ ID NO: 21005 - DNA, 22 bp, synthetic construct
  misc_feature 1..22: note = Artificial sequence related to HLA knockouts in cell therapy
  source 1..22: mol_type = other DNA
cctggatactcacgacgcggac

SEQ ID NO: 21006 - DNA, 22 bp, synthetic construct
  misc_feature 1..22: note = Artificial sequence related to HLA knockouts in cell therapy
  source 1..22: mol_type = other DNA
ctggatactcacgacgcggacc

SEQ ID NO: 21007 - DNA, 22 bp, synthetic construct
  misc_feature 1..22: note = Artificial sequence related to HLA knockouts in cell therapy
  source 1..22: mol_type = other DNA
tggatactcacgacgcggaccc

SEQ ID NO: 21008 - DNA, 22 bp, synthetic construct
  misc_feature 1..22: note = Artificial sequence related to HLA knockouts in cell therapy
  source 1..22: mol_type = other DNA
ggatactcacgacgcggaccca

SEQ ID NO: 21009 - DNA, 22 bp, synthetic construct
  misc_feature 1..22: note = Artificial sequence related to HLA knockouts in cell therapy
  source 1..22: mol_type = other DNA
gatactcacgacgcggacccag

SEQ ID NO: 21010 - DNA, 22 bp, synthetic construct
  misc_feature 1..22: note = Artificial sequence related to HLA knockouts in cell therapy
  source 1..22: mol_type = other DNA
actcacgacgcggacccagttc

SEQ ID NO: 21011 - DNA, 22 bp, synthetic construct
  misc_feature 1..22: note = Artificial sequence related to HLA knockouts in cell therapy
  source 1..22: mol_type = other DNA
ctcacgacgcggacccagttct

SEQ ID NO: 21012 - DNA, 22 bp, synthetic construct
  misc_feature 1..22: note = Artificial sequence related to HLA knockouts in cell therapy
  source 1..22: mol_type = other DNA
tcacgacgcggacccagttctc

SEQ ID NO: 21013 - DNA, 22 bp, synthetic construct
  misc_feature 1..22: note = Artificial sequence related to HLA knockouts in cell therapy
  source 1..22: mol_type = other DNA
cacgacgcggacccagttctca

SEQ ID NO: 21014 - DNA, 22 bp, synthetic construct
  misc_feature 1..22: note = Artificial sequence related to HLA knockouts in cell therapy
  source 1..22: mol_type = other DNA
acgacgcggacccagttctcac

SEQ ID NO: 21015 - DNA, 22 bp, synthetic construct
  misc_feature 1..22: note = Artificial sequence related to HLA knockouts in cell therapy
  source 1..22: mol_type = other DNA
cgacgcggacccagttctcact

SEQ ID NO: 21016 - DNA, 22 bp, synthetic construct
  misc_feature 1..22: note = Artificial sequence related to HLA knockouts in cell therapy
  source 1..22: mol_type = other DNA
gacgcggacccagttctcactc

SEQ ID NO: 21017 - DNA, 22 bp, synthetic construct
  misc_feature 1..22: note = Artificial sequence related to HLA knockouts in cell therapy
  source 1..22: mol_type = other DNA
acgcggacccagttctcactcc

SEQ ID NO: 21018 - DNA, 22 bp, synthetic construct
  misc_feature 1..22: note = Artificial sequence related to HLA knockouts in cell therapy
  source 1..22: mol_type = other DNA
cgcggacccagttctcactccc

SEQ ID NO: 21019 - DNA, 22 bp, synthetic construct
  misc_feature 1..22: note = Artificial sequence related to HLA knockouts in cell therapy
  source 1..22: mol_type = other DNA
gcggacccagttctcactccca

SEQ ID NO: 21020 - DNA, 22 bp, synthetic construct
  misc_feature 1..22: note = Artificial sequence related to HLA knockouts in cell therapy
  source 1..22: mol_type = other DNA
ctcactcccattgggtgtcggg

SEQ ID NO: 21021 - DNA, 22 bp, synthetic construct
  misc_feature 1..22: note = Artificial sequence related to HLA knockouts in cell therapy
  source 1..22: mol_type = other DNA
gccaatcagtgtcgtcgcggtc

SEQ ID NO: 21022 - DNA, 22 bp, synthetic construct
  misc_feature 1..22: note = Artificial sequence related to HLA knockouts in cell therapy
  source 1..22: mol_type = other DNA
ccaatcagtgtcgtcgcggtcg

SEQ ID NO: 21023 - DNA, 22 bp, synthetic construct
  misc_feature 1..22: note = Artificial sequence related to HLA knockouts in cell therapy
  source 1..22: mol_type = other DNA
caatcagtgtcgtcgcggtcgc

SEQ ID NO: 21024 - DNA, 22 bp, synthetic construct
  misc_feature 1..22: note = Artificial sequence related to HLA knockouts in cell therapy
  source 1..22: mol_type = other DNA
aatcagtgtcgtcgcggtcgcg

SEQ ID NO: 21025 - DNA, 22 bp, synthetic construct
  misc_feature 1..22: note = Artificial sequence related to HLA knockouts in cell therapy
  source 1..22: mol_type = other DNA
atcagtgtcgtcgcggtcgcgg

SEQ ID NO: 21026 - DNA, 22 bp, synthetic construct
  misc_feature 1..22: note = Artificial sequence related to HLA knockouts in cell therapy
  source 1..22: mol_type = other DNA
tcagtgtcgtcgcggtcgcggt

SEQ ID NO: 21027 - DNA, 22 bp, synthetic construct
  misc_feature 1..22: note = Artificial sequence related to HLA knockouts in cell therapy
  source 1..22: mol_type = other DNA
cagtgtcgtcgcggtcgcggtt

SEQ ID NO: 21028 - DNA, 22 bp, synthetic construct
  misc_feature 1..22: note = Artificial sequence related to HLA knockouts in cell therapy
  source 1..22: mol_type = other DNA
agtgtcgtcgcggtcgcggttc

SEQ ID NO: 21029 - DNA, 22 bp, synthetic construct
  misc_feature 1..22: note = Artificial sequence related to HLA knockouts in cell therapy
  source 1..22: mol_type = other DNA
gtgtcgtcgcggtcgcggttct

SEQ ID NO: 21030 - DNA, 22 bp, synthetic construct
  misc_feature 1..22: note = Artificial sequence related to HLA knockouts in cell therapy
  source 1..22: mol_type = other DNA
tgtcgtcgcggtcgcggttcta

SEQ ID NO: 21031 - DNA, 22 bp, synthetic construct
  misc_feature 1..22: note = Artificial sequence related to HLA knockouts in cell therapy
  source 1..22: mol_type = other DNA
gtcgtcgcggtcgcggttctaa

SEQ ID NO: 21032 - DNA, 22 bp, synthetic construct
  misc_feature 1..22: note = Artificial sequence related to HLA knockouts in cell therapy
  source 1..22: mol_type = other DNA
cgtcgcggtcgcggttctaaag

SEQ ID NO: 21033 - DNA, 22 bp, synthetic construct
  misc_feature 1..22: note = Artificial sequence related to HLA knockouts in cell therapy
  source 1..22: mol_type = other DNA
cgcggtcgcggttctaaagtcc

SEQ ID NO: 21034 - DNA, 22 bp, synthetic construct
  misc_feature 1..22: note = Artificial sequence related to HLA knockouts in cell therapy
  source 1..22: mol_type = other DNA
gcggtcgcggttctaaagtccg

SEQ ID NO: 21035 - DNA, 22 bp, synthetic construct
  misc_feature 1..22: note = Artificial sequence related to HLA knockouts in cell therapy
  source 1..22: mol_type = other DNA
cggtcgcggttctaaagtccgc

SEQ ID NO: 21036 - DNA, 22 bp, synthetic construct
  misc_feature 1..22: note = Artificial sequence related to HLA knockouts in cell therapy
  source 1..22: mol_type = other DNA
cgcggttctaaagtccgcacgc

SEQ ID NO: 21037 - DNA, 22 bp, synthetic construct
  misc_feature 1..22: note = Artificial sequence related to HLA knockouts in cell therapy
  source 1..22: mol_type = other DNA
ctaaagtccgcacgcacccacc

SEQ ID NO: 21038 - DNA, 22 bp, synthetic construct
  misc_feature 1..22: note = Artificial sequence related to HLA knockouts in cell therapy
  source 1..22: mol_type = other DNA
taaagtccgcacgcacccaccg

SEQ ID NO: 21039 - DNA, 22 bp, synthetic construct
  misc_feature 1..22: note = Artificial sequence related to HLA knockouts in cell therapy
  source 1..22: mol_type = other DNA
aaagtccgcacgcacccaccgg

SEQ ID NO: 21040 - DNA, 22 bp, synthetic construct
  misc_feature 1..22: note = Artificial sequence related to HLA knockouts in cell therapy
  source 1..22: mol_type = other DNA
aagtccgcacgcacccaccggg

SEQ ID NO: 21041 - DNA, 22 bp, synthetic construct
  misc_feature 1..22: note = Artificial sequence related to HLA knockouts in cell therapy
  source 1..22: mol_type = other DNA
agtccgcacgcacccaccggga

SEQ ID NO: 21042 - DNA, 22 bp, synthetic construct
  misc_feature 1..22: note = Artificial sequence related to HLA knockouts in cell therapy
  source 1..22: mol_type = other DNA
gtccgcacgcacccaccgggac

SEQ ID NO: 21043 - DNA, 22 bp, synthetic construct
  misc_feature 1..22: note = Artificial sequence related to HLA knockouts in cell therapy
  source 1..22: mol_type = other DNA
tccgcacgcacccaccgggact

SEQ ID NO: 21044 - DNA, 22 bp, synthetic construct
  misc_feature 1..22: note = Artificial sequence related to HLA knockouts in cell therapy
  source 1..22: mol_type = other DNA
ccgcacgcacccaccgggactc

SEQ ID NO: 21045 - DNA, 22 bp, synthetic construct
  misc_feature 1..22: note = Artificial sequence related to HLA knockouts in cell therapy
  source 1..22: mol_type = other DNA
cgcacgcacccaccgggactca

SEQ ID NO: 21046 - DNA, 22 bp, synthetic construct
  misc_feature 1..22: note = Artificial sequence related to HLA knockouts in cell therapy
  source 1..22: mol_type = other DNA
gcacgcacccaccgggactcag

SEQ ID NO: 21047 - DNA, 22 bp, synthetic construct
  misc_feature 1..22: note = Artificial sequence related to HLA knockouts in cell therapy
  source 1..22: mol_type = other DNA
cacgcacccaccgggactcaga

SEQ ID NO: 21048 - DNA, 22 bp, synthetic construct
  misc_feature 1..22: note = Artificial sequence related to HLA knockouts in cell therapy
  source 1..22: mol_type = other DNA
acgcacccaccgggactcagat

SEQ ID NO: 21049 - DNA, 22 bp, synthetic construct
  misc_feature 1..22: note = Artificial sequence related to HLA knockouts in cell therapy
  source 1..22: mol_type = other DNA
cgcacccaccgggactcagatt

SEQ ID NO: 21050 - DNA, 22 bp, synthetic construct
  misc_feature 1..22: note = Artificial sequence related to HLA knockouts in cell therapy
  source 1..22: mol_type = other DNA
gcacccaccgggactcagattc

SEQ ID NO: 21051 - DNA, 22 bp, synthetic construct
  misc_feature 1..22: note = Artificial sequence related to HLA knockouts in cell therapy
  source 1..22: mol_type = other DNA
cccaccgggactcagattctcc

SEQ ID NO: 21052 - DNA, 22 bp, synthetic construct
  misc_feature 1..22: note = Artificial sequence related to HLA knockouts in cell therapy
  source 1..22: mol_type = other DNA
ccaccgggactcagattctccc

SEQ ID NO: 21053 - DNA, 22 bp, synthetic construct
  misc_feature 1..22: note = Artificial sequence related to HLA knockouts in cell therapy
  source 1..22: mol_type = other DNA
caccgggactcagattctcccc

SEQ ID NO: 21054 - DNA, 22 bp, synthetic construct
  misc_feature 1..22: note = Artificial sequence related to HLA knockouts in cell therapy
  source 1..22: mol_type = other DNA
ccgggactcagattctccccag

SEQ ID NO: 21055 - DNA, 22 bp, synthetic construct
  misc_feature 1..22: note = Artificial sequence related to HLA knockouts in cell therapy
  source 1..22: mol_type = other DNA
ctcagattctccccagacgccg

SEQ ID NO: 21056 - DNA, 22 bp, synthetic construct
  misc_feature 1..22: note = Artificial sequence related to HLA knockouts in cell therapy
  source 1..22: mol_type = other DNA
cagattctccccagacgccgag

SEQ ID NO: 21057 - DNA, 22 bp, synthetic construct
  misc_feature 1..22: note = Artificial sequence related to HLA knockouts in cell therapy
  source 1..22: mol_type = other DNA
agattctccccagacgccgagg

SEQ ID NO: 21058 - DNA, 22 bp, synthetic construct
  misc_feature 1..22: note = Artificial sequence related to HLA knockouts in cell therapy
  source 1..22: mol_type = other DNA
gattctccccagacgccgagga

SEQ ID NO: 21059 - DNA, 22 bp, synthetic construct
  misc_feature 1..22: note = Artificial sequence related to HLA knockouts in cell therapy
  source 1..22: mol_type = other DNA
ttctccccagacgccgaggatg

SEQ ID NO: 21060 - DNA, 22 bp, synthetic construct
  misc_feature 1..22: note = Artificial sequence related to HLA knockouts in cell therapy
  source 1..22: mol_type = other DNA
tctccccagacgccgaggatgg

SEQ ID NO: 21061 - DNA, 22 bp, synthetic construct
  misc_feature 1..22: note = Artificial sequence related to HLA knockouts in cell therapy
  source 1..22: mol_type = other DNA
ctccccagacgccgaggatggc

SEQ ID NO: 21062 - DNA, 22 bp, synthetic construct
  misc_feature 1..22: note = Artificial sequence related to HLA knockouts in cell therapy
  source 1..22: mol_type = other DNA
tccccagacgccgaggatggcc

SEQ ID NO: 21063 - DNA, 22 bp, synthetic construct
  misc_feature 1..22: note = Artificial sequence related to HLA knockouts in cell therapy
  source 1..22: mol_type = other DNA
ccccagacgccgaggatggccg

SEQ ID NO: 21064 - DNA, 22 bp, synthetic construct
  misc_feature 1..22: note = Artificial sequence related to HLA knockouts in cell therapy
  source 1..22: mol_type = other DNA
cccagacgccgaggatggccgt

SEQ ID NO: 21065 - DNA, 22 bp, synthetic construct
  misc_feature 1..22: note = Artificial sequence related to HLA knockouts in cell therapy
  source 1..22: mol_type = other DNA
ccagacgccgaggatggccgtc

SEQ ID NO: 21066 - DNA, 22 bp, synthetic construct
  misc_feature 1..22: note = Artificial sequence related to HLA knockouts in cell therapy
  source 1..22: mol_type = other DNA
cagacgccgaggatggccgtca

SEQ ID NO: 21067 - DNA, 22 bp, synthetic construct
  misc_feature 1..22: note = Artificial sequence related to HLA knockouts in cell therapy
  source 1..22: mol_type = other DNA
agacgccgaggatggccgtcat

SEQ ID NO: 21068 - DNA, 22 bp, synthetic construct
  misc_feature 1..22: note = Artificial sequence related to HLA knockouts in cell therapy
  source 1..22: mol_type = other DNA
gacgccgaggatggccgtcatg

SEQ ID NO: 21069 - DNA, 22 bp, synthetic construct
  misc_feature 1..22: note = Artificial sequence related to HLA knockouts in cell therapy
  source 1..22: mol_type = other DNA
acgccgaggatggccgtcatgg

SEQ ID NO: 21070 - DNA, 22 bp, synthetic construct
  misc_feature 1..22: note = Artificial sequence related to HLA knockouts in cell therapy
  source 1..22: mol_type = other DNA
cgccgaggatggccgtcatggc

SEQ ID NO: 21071 - DNA, 22 bp, synthetic construct
  misc_feature 1..22: note = Artificial sequence related to HLA knockouts in cell therapy
  source 1..22: mol_type = other DNA
gccgaggatggccgtcatggcg

SEQ ID NO: 21072 - DNA, 22 bp, synthetic construct
  misc_feature 1..22: note = Artificial sequence related to HLA knockouts in cell therapy
  source 1..22: mol_type = other DNA
ccgaggatggccgtcatggcgc

SEQ ID NO: 21073 - DNA, 22 bp, synthetic construct
  misc_feature 1..22: note = Artificial sequence related to HLA knockouts in cell therapy
  source 1..22: mol_type = other DNA
cgaggatggccgtcatggcgcc

SEQ ID NO: 21074 - DNA, 22 bp, synthetic construct
  misc_feature 1..22: note = Artificial sequence related to HLA knockouts in cell therapy
  source 1..22: mol_type = other DNA
gaggatggccgtcatggcgccc

SEQ ID NO: 21075 - DNA, 22 bp, synthetic construct
  misc_feature 1..22: note = Artificial sequence related to HLA knockouts in cell therapy
  source 1..22: mol_type = other DNA
aggatggccgtcatggcgcccc

SEQ ID NO: 21076 - DNA, 22 bp, synthetic construct
  misc_feature 1..22: note = Artificial sequence related to HLA knockouts in cell therapy
  source 1..22: mol_type = other DNA
ggatggccgtcatggcgccccg

SEQ ID NO: 21077 - DNA, 22 bp, synthetic construct
  misc_feature 1..22: note = Artificial sequence related to HLA knockouts in cell therapy
  source 1..22: mol_type = other DNA
gatggccgtcatggcgccccga

SEQ ID NO: 21078 - DNA, 22 bp, synthetic construct
  misc_feature 1..22: note = Artificial sequence related to HLA knockouts in cell therapy
  source 1..22: mol_type = other DNA
atggccgtcatggcgccccgaa

SEQ ID NO: 21079 - DNA, 22 bp, synthetic construct
  misc_feature 1..22: note = Artificial sequence related to HLA knockouts in cell therapy
  source 1..22: mol_type = other DNA
tggccgtcatggcgccccgaac

SEQ ID NO: 21080 - DNA, 22 bp, synthetic construct
  misc_feature 1..22: note = Artificial sequence related to HLA knockouts in cell therapy
  source 1..22: mol_type = other DNA
ggccgtcatggcgccccgaacc

SEQ ID NO: 21081 - DNA, 22 bp, synthetic construct
  misc_feature 1..22: note = Artificial sequence related to HLA knockouts in cell therapy
  source 1..22: mol_type = other DNA
gccgtcatggcgccccgaaccc

SEQ ID NO: 21082 - DNA, 22 bp, synthetic construct
  misc_feature 1..22: note = Artificial sequence related to HLA knockouts in cell therapy
  source 1..22: mol_type = other DNA
ccgtcatggcgccccgaaccct

SEQ ID NO: 21083 - DNA, 22 bp, synthetic construct
  misc_feature 1..22: note = Artificial sequence related to HLA knockouts in cell therapy
  source 1..22: mol_type = other DNA
cgtcatggcgccccgaaccctc

SEQ ID NO: 21084 - DNA, 22 bp, synthetic construct
  misc_feature 1..22: note = Artificial sequence related to HLA knockouts in cell therapy
  source 1..22: mol_type = other DNA
gtcatggcgccccgaaccctcg

SEQ ID NO: 21085 - DNA, 22 bp, synthetic construct
  misc_feature 1..22: note = Artificial sequence related to HLA knockouts in cell therapy
  source 1..22: mol_type = other DNA
tcatggcgccccgaaccctcgt

SEQ ID NO: 21086 - DNA, 22 bp, synthetic construct
  misc_feature 1..22: note = Artificial sequence related to HLA knockouts in cell therapy
  source 1..22: mol_type = other DNA
catggcgccccgaaccctcgtc

SEQ ID NO: 21087 - DNA, 22 bp, synthetic construct
  misc_feature 1..22: note = Artificial sequence related to HLA knockouts in cell therapy
  source 1..22: mol_type = other DNA
atggcgccccgaaccctcgtcc

SEQ ID NO: 21088 - DNA, 22 bp, synthetic construct
  misc_feature 1..22: note = Artificial sequence related to HLA knockouts in cell therapy
  source 1..22: mol_type = other DNA
tggcgccccgaaccctcgtcct

SEQ ID NO: 21089 - DNA, 22 bp, synthetic construct
  misc_feature 1..22: note = Artificial sequence related to HLA knockouts in cell therapy
  source 1..22: mol_type = other DNA
ggcgccccgaaccctcgtcctg

SEQ ID NO: 21090 - DNA, 22 bp, synthetic construct
  misc_feature 1..22: note = Artificial sequence related to HLA knockouts in cell therapy
  source 1..22: mol_type = other DNA
gcgccccgaaccctcgtcctgc

SEQ ID NO: 21091 - DNA, 22 bp, synthetic construct
  misc_feature 1..22: note = Artificial sequence related to HLA knockouts in cell therapy
  source 1..22: mol_type = other DNA
cgccccgaaccctcgtcctgct

SEQ ID NO: 21092 - DNA, 22 bp, synthetic construct
  misc_feature 1..22: note = Artificial sequence related to HLA knockouts in cell therapy
  source 1..22: mol_type = other DNA
gccccgaaccctcgtcctgcta

SEQ ID NO: 21093 - DNA, 22 bp, synthetic construct
  misc_feature 1..22: note = Artificial sequence related to HLA knockouts in cell therapy
  source 1..22: mol_type = other DNA
ccccgaaccctcgtcctgctac

SEQ ID NO: 21094 - DNA, 22 bp, synthetic construct
  misc_feature 1..22: note = Artificial sequence related to HLA knockouts in cell therapy
  source 1..22: mol_type = other DNA
cccgaaccctcgtcctgctact

SEQ ID NO: 21095 - DNA, 22 bp, synthetic construct
  misc_feature 1..22: note = Artificial sequence related to HLA knockouts in cell therapy
  source 1..22: mol_type = other DNA
ccgaaccctcgtcctgctactc

SEQ ID NO: 21096 - DNA, 22 bp, synthetic construct
  misc_feature 1..22: note = Artificial sequence related to HLA knockouts in cell therapy
  source 1..22: mol_type = other DNA
accctcgtcctgctactctcgg

SEQ ID NO: 21097 - DNA, 22 bp, synthetic construct
  misc_feature 1..22: note = Artificial sequence related to HLA knockouts in cell therapy
  source 1..22: mol_type = other DNA
ccctcgtcctgctactctcggg

SEQ ID NO: 21098 - DNA, 22 bp, synthetic construct
  misc_feature 1..22: note = Artificial sequence related to HLA knockouts in cell therapy
  source 1..22: mol_type = other DNA
cctcgtcctgctactctcgggg

SEQ ID NO: 21099 - DNA, 22 bp, synthetic construct
  misc_feature 1..22: note = Artificial sequence related to HLA knockouts in cell therapy
  source 1..22: mol_type = other DNA
ctcgtcctgctactctcggggg

SEQ ID NO: 21100 - DNA, 22 bp, synthetic construct
  misc_feature 1..22: note = Artificial sequence related to HLA knockouts in cell therapy
  source 1..22: mol_type = other DNA
tcgtcctgctactctcgggggc

SEQ ID NO: 21101 - DNA, 22 bp, synthetic construct
  misc_feature 1..22: note = Artificial sequence related to HLA knockouts in cell therapy
  source 1..22: mol_type = other DNA
cgtcctgctactctcgggggct

SEQ ID NO: 21102 - DNA, 22 bp, synthetic construct
  misc_feature 1..22: note = Artificial sequence related to HLA knockouts in cell therapy
  source 1..22: mol_type = other DNA
gtcctgctactctcgggggctc

SEQ ID NO: 21103 - DNA, 22 bp, synthetic construct
  misc_feature 1..22: note = Artificial sequence related to HLA knockouts in cell therapy
  source 1..22: mol_type = other DNA
tcctgctactctcgggggctct

SEQ ID NO: 21104 - DNA, 22 bp, synthetic construct
  misc_feature 1..22: note = Artificial sequence related to HLA knockouts in cell therapy
  source 1..22: mol_type = other DNA
cctgctactctcgggggctctg

SEQ ID NO: 21105 - DNA, 22 bp, synthetic construct
  misc_feature 1..22: note = Artificial sequence related to HLA knockouts in cell therapy
  source 1..22: mol_type = other DNA
ctgctactctcgggggctctgg

SEQ ID NO: 21106 - DNA, 22 bp, synthetic construct
  misc_feature 1..22: note = Artificial sequence related to HLA knockouts in cell therapy
  source 1..22: mol_type = other DNA
tgctactctcgggggctctggc

SEQ ID NO: 21107 - DNA, 22 bp, synthetic construct
  misc_feature 1..22: note = Artificial sequence related to HLA knockouts in cell therapy
  source 1..22: mol_type = other DNA
gctactctcgggggctctggcc

SEQ ID NO: 21108 - DNA, 22 bp, synthetic construct
  misc_feature 1..22: note = Artificial sequence related to HLA knockouts in cell therapy
  source 1..22: mol_type = other DNA
ctactctcgggggctctggccc

SEQ ID NO: 21109 - DNA, 22 bp, synthetic construct
  misc_feature 1..22: note = Artificial sequence related to HLA knockouts in cell therapy
  source 1..22: mol_type = other DNA
tactctcgggggctctggccct

SEQ ID NO: 21110 - DNA, 22 bp, synthetic construct
  misc_feature 1..22: note = Artificial sequence related to HLA knockouts in cell therapy
  source 1..22: mol_type = other DNA
actctcgggggctctggccctg

SEQ ID NO: 21111 - DNA, 22 bp, synthetic construct
  misc_feature 1..22: note = Artificial sequence related to HLA knockouts in cell therapy
  source 1..22: mol_type = other DNA
ctctcgggggctctggccctga

SEQ ID NO: 21112 - DNA, 22 bp, synthetic construct
  misc_feature 1..22: note = Artificial sequence related to HLA knockouts in cell therapy
  source 1..22: mol_type = other DNA
tctcgggggctctggccctgac

SEQ ID NO: 21113 - DNA, 22 bp, synthetic construct
  misc_feature 1..22: note = Artificial sequence related to HLA knockouts in cell therapy
  source 1..22: mol_type = other DNA
ctcgggggctctggccctgacc

SEQ ID NO: 21114 - DNA, 22 bp, synthetic construct
  misc_feature 1..22: note = Artificial sequence related to HLA knockouts in cell therapy
  source 1..22: mol_type = other DNA
tcgggggctctggccctgaccc

SEQ ID NO: 21115 - DNA, 22 bp, synthetic construct
  misc_feature 1..22: note = Artificial sequence related to HLA knockouts in cell therapy
  source 1..22: mol_type = other DNA
cgggggctctggccctgaccca

SEQ ID NO: 21116 - DNA, 22 bp, synthetic construct
  misc_feature 1..22: note = Artificial sequence related to HLA knockouts in cell therapy
  source 1..22: mol_type = other DNA
gggggctctggccctgacccag

SEQ ID NO: 21117 - DNA, 22 bp, synthetic construct
  misc_feature 1..22: note = Artificial sequence related to HLA knockouts in cell therapy
  source 1..22: mol_type = other DNA
ggggctctggccctgacccaga

SEQ ID NO: 21118 - DNA, 22 bp, synthetic construct
  misc_feature 1..22: note = Artificial sequence related to HLA knockouts in cell therapy
  source 1..22: mol_type = other DNA
gggctctggccctgacccagac

SEQ ID NO: 21119 - DNA, 22 bp, synthetic construct
  misc_feature 1..22: note = Artificial sequence related to HLA knockouts in cell therapy
  source 1..22: mol_type = other DNA
ggctctggccctgacccagacc

SEQ ID NO: 21120 - DNA, 22 bp, synthetic construct
  misc_feature 1..22: note = Artificial sequence related to HLA knockouts in cell therapy
  source 1..22: mol_type = other DNA
gctctggccctgacccagacct

SEQ ID NO: 21121 - DNA, 22 bp, synthetic construct
  misc_feature 1..22: note = Artificial sequence related to HLA knockouts in cell therapy
  source 1..22: mol_type = other DNA
ctctggccctgacccagacctg

SEQ ID NO: 21122 - DNA, 22 bp, synthetic construct
  misc_feature 1..22: note = Artificial sequence related to HLA knockouts in cell therapy
  source 1..22: mol_type = other DNA
tctggccctgacccagacctgg

SEQ ID NO: 21123 - DNA, 22 bp, synthetic construct
  misc_feature 1..22: note = Artificial sequence related to HLA knockouts in cell therapy
  source 1..22: mol_type = other DNA
ctggccctgacccagacctggg

SEQ ID NO: 21124 - DNA, 22 bp, synthetic construct
  misc_feature 1..22: note = Artificial sequence related to HLA knockouts in cell therapy
  source 1..22: mol_type = other DNA
tggccctgacccagacctgggc

SEQ ID NO: 21125 - DNA, 22 bp, synthetic construct
  misc_feature 1..22: note = Artificial sequence related to HLA knockouts in cell therapy
  source 1..22: mol_type = other DNA
ggccctgacccagacctgggcg

SEQ ID NO: 21126 - DNA, 22 bp, synthetic construct
  misc_feature 1..22: note = Artificial sequence related to HLA knockouts in cell therapy
  source 1..22: mol_type = other DNA
gccctgacccagacctgggcgg

SEQ ID NO: 21127 - DNA, 22 bp, synthetic construct
  misc_feature 1..22: note = Artificial sequence related to HLA knockouts in cell therapy
  source 1..22: mol_type = other DNA
ccctgacccagacctgggcggg

SEQ ID NO: 21128 - DNA, 22 bp, synthetic construct
  misc_feature 1..22: note = Artificial sequence related to HLA knockouts in cell therapy
  source 1..22: mol_type = other DNA
cctgacccagacctgggcgggc

SEQ ID NO: 21129 - DNA, 22 bp, synthetic construct
  misc_feature 1..22: note = Artificial sequence related to HLA knockouts in cell therapy
  source 1..22: mol_type = other DNA
ctgacccagacctgggcgggct

SEQ ID NO: 21130 - DNA, 22 bp, synthetic construct
  misc_feature 1..22: note = Artificial sequence related to HLA knockouts in cell therapy
  source 1..22: mol_type = other DNA
tgacccagacctgggcgggctc

SEQ ID NO: 21131 - DNA, 22 bp, synthetic construct
  misc_feature 1..22: note = Artificial sequence related to HLA knockouts in cell therapy
  source 1..22: mol_type = other DNA
gacccagacctgggcgggctct

SEQ ID NO: 21132 - DNA, 22 bp, synthetic construct
  misc_feature 1..22: note = Artificial sequence related to HLA knockouts in cell therapy
  source 1..22: mol_type = other DNA
acccagacctgggcgggctctc

SEQ ID NO: 21133 - DNA, 22 bp, synthetic construct
  misc_feature 1..22: note = Artificial sequence related to HLA knockouts in cell therapy
  source 1..22: mol_type = other DNA
cccagacctgggcgggctctca

SEQ ID NO: 21134 - DNA, 22 bp, synthetic construct
  misc_feature 1..22: note = Artificial sequence related to HLA knockouts in cell therapy
  source 1..22: mol_type = other DNA
ccagacctgggcgggctctcac

SEQ ID NO: 21135 - DNA, 22 bp, synthetic construct
  misc_feature 1..22: note = Artificial sequence related to HLA knockouts in cell therapy
  source 1..22: mol_type = other DNA
cagacctgggcgggctctcact

SEQ ID NO: 21136 - DNA, 22 bp, synthetic construct
  misc_feature 1..22: note = Artificial sequence related to HLA knockouts in cell therapy
  source 1..22: mol_type = other DNA
agacctgggcgggctctcactc

SEQ ID NO: 21137 - DNA, 22 bp, synthetic construct
  misc_feature 1..22: note = Artificial sequence related to HLA knockouts in cell therapy
  source 1..22: mol_type = other DNA
gacctgggcgggctctcactcc

SEQ ID NO: 21138 - DNA, 22 bp, synthetic construct
  misc_feature 1..22: note = Artificial sequence related to HLA knockouts in cell therapy
  source 1..22: mol_type = other DNA
acctgggcgggctctcactcca

SEQ ID NO: 21139 - DNA, 22 bp, synthetic construct
  misc_feature 1..22: note = Artificial sequence related to HLA knockouts in cell therapy
  source 1..22: mol_type = other DNA
cctgggcgggctctcactccat

SEQ ID NO: 21140 - DNA, 22 bp, synthetic construct
  misc_feature 1..22: note = Artificial sequence related to HLA knockouts in cell therapy
  source 1..22: mol_type = other DNA
ctgggcgggctctcactccatg

SEQ ID NO: 21141 - DNA, 22 bp, synthetic construct
  misc_feature 1..22: note = Artificial sequence related to HLA knockouts in cell therapy
  source 1..22: mol_type = other DNA
tgggcgggctctcactccatga

SEQ ID NO: 21142 - DNA, 22 bp, synthetic construct
  misc_feature 1..22: note = Artificial sequence related to HLA knockouts in cell therapy
  source 1..22: mol_type = other DNA
gggcgggctctcactccatgag

SEQ ID NO: 21143 - DNA, 22 bp, synthetic construct
  misc_feature 1..22: note = Artificial sequence related to HLA knockouts in cell therapy
  source 1..22: mol_type = other DNA
ggcgggctctcactccatgagg

SEQ ID NO: 21144 - DNA, 22 bp, synthetic construct
  misc_feature 1..22: note = Artificial sequence related to HLA knockouts in cell therapy
  source 1..22: mol_type = other DNA
gcgggctctcactccatgaggt

SEQ ID NO: 21145 - DNA, 22 bp, synthetic construct
  misc_feature 1..22: note = Artificial sequence related to HLA knockouts in cell therapy
  source 1..22: mol_type = other DNA
tcttcacatccgtgtcccggcc

SEQ ID NO: 21146 - DNA, 22 bp, synthetic construct
  misc_feature 1..22: note = Artificial sequence related to HLA knockouts in cell therapy
  source 1..22: mol_type = other DNA
cttcacatccgtgtcccggccc

SEQ ID NO: 21147 - DNA, 22 bp, synthetic construct
  misc_feature 1..22: note = Artificial sequence related to HLA knockouts in cell therapy
  source 1..22: mol_type = other DNA
ttcacatccgtgtcccggcccg

SEQ ID NO: 21148 - DNA, 22 bp, synthetic construct
  misc_feature 1..22: note = Artificial sequence related to HLA knockouts in cell therapy
  source 1..22: mol_type = other DNA
tcacatccgtgtcccggcccgg

SEQ ID NO: 21149 - DNA, 22 bp, synthetic construct
  misc_feature 1..22: note = Artificial sequence related to HLA knockouts in cell therapy
  source 1..22: mol_type = other DNA
cacatccgtgtcccggcccggc

SEQ ID NO: 21150 - DNA, 22 bp, synthetic construct
  misc_feature 1..22: note = Artificial sequence related to HLA knockouts in cell therapy
  source 1..22: mol_type = other DNA
acatccgtgtcccggcccggcc

SEQ ID NO: 21151 - DNA, 22 bp, synthetic construct
  misc_feature 1..22: note = Artificial sequence related to HLA knockouts in cell therapy
  source 1..22: mol_type = other DNA
catccgtgtcccggcccggccg

SEQ ID NO: 21152 - DNA, 22 bp, synthetic construct
  misc_feature 1..22: note = Artificial sequence related to HLA knockouts in cell therapy
  source 1..22: mol_type = other DNA
atccgtgtcccggcccggccgc

SEQ ID NO: 21153 - DNA, 22 bp, synthetic construct
  misc_feature 1..22: note = Artificial sequence related to HLA knockouts in cell therapy
  source 1..22: mol_type = other DNA
tccgtgtcccggcccggccgcg

SEQ ID NO: 21154 - DNA, 22 bp, synthetic construct
  misc_feature 1..22: note = Artificial sequence related to HLA knockouts in cell therapy
  source 1..22: mol_type = other DNA
ccgtgtcccggcccggccgcgg

SEQ ID NO: 21155 - DNA, 22 bp, synthetic construct
  misc_feature 1..22: note = Artificial sequence related to HLA knockouts in cell therapy
  source 1..22: mol_type = other DNA
cgtgtcccggcccggccgcggg

SEQ ID NO: 21156 - DNA, 22 bp, synthetic construct
  misc_feature 1..22: note = Artificial sequence related to HLA knockouts in cell therapy
  source 1..22: mol_type = other DNA
gtgtcccggcccggccgcgggg

SEQ ID NO: 21157 - DNA, 22 bp, synthetic construct
  misc_feature 1..22: note = Artificial sequence related to HLA knockouts in cell therapy
  source 1..22: mol_type = other DNA
tgtcccggcccggccgcgggga

SEQ ID NO: 21158 - DNA, 22 bp, synthetic construct
  misc_feature 1..22: note = Artificial sequence related to HLA knockouts in cell therapy
  source 1..22: mol_type = other DNA
gtcccggcccggccgcggggag

SEQ ID NO: 21159 - DNA, 22 bp, synthetic construct
  misc_feature 1..22: note = Artificial sequence related to HLA knockouts in cell therapy
  source 1..22: mol_type = other DNA
tcccggcccggccgcggggagc

SEQ ID NO: 21160 - DNA, 22 bp, synthetic construct
  misc_feature 1..22: note = Artificial sequence related to HLA knockouts in cell therapy
  source 1..22: mol_type = other DNA
cccggcccggccgcggggagcc

SEQ ID NO: 21161 - DNA, 22 bp, synthetic construct
  misc_feature 1..22: note = Artificial sequence related to HLA knockouts in cell therapy
  source 1..22: mol_type = other DNA
ccggcccggccgcggggagccc

SEQ ID NO: 21162 - DNA, 22 bp, synthetic construct
  misc_feature 1..22: note = Artificial sequence related to HLA knockouts in cell therapy
  source 1..22: mol_type = other DNA
cggcccggccgcggggagcccc

SEQ ID NO: 21163 - DNA, 22 bp, synthetic construct
  misc_feature 1..22: note = Artificial sequence related to HLA knockouts in cell therapy
  source 1..22: mol_type = other DNA
ggcccggccgcggggagccccg

SEQ ID NO: 21164 - DNA, 22 bp, synthetic construct
  misc_feature 1..22: note = Artificial sequence related to HLA knockouts in cell therapy
  source 1..22: mol_type = other DNA
gcccggccgcggggagccccgc

SEQ ID NO: 21165 - DNA, 22 bp, synthetic construct
  misc_feature 1..22: note = Artificial sequence related to HLA knockouts in cell therapy
  source 1..22: mol_type = other DNA
cccggccgcggggagccccgct

SEQ ID NO: 21166 - DNA, 22 bp, synthetic construct
  misc_feature 1..22: note = Artificial sequence related to HLA knockouts in cell therapy
  source 1..22: mol_type = other DNA
ccggccgcggggagccccgctt

SEQ ID NO: 21167 - DNA, 22 bp, synthetic construct
  misc_feature 1..22: note = Artificial sequence related to HLA knockouts in cell therapy
  source 1..22: mol_type = other DNA
cggccgcggggagccccgcttc

SEQ ID NO: 21168 - DNA, 22 bp, synthetic construct
  misc_feature 1..22: note = Artificial sequence related to HLA knockouts in cell therapy
  source 1..22: mol_type = other DNA
ggccgcggggagccccgcttca

SEQ ID NO: 21169 - DNA, 22 bp, synthetic construct
  misc_feature 1..22: note = Artificial sequence related to HLA knockouts in cell therapy
  source 1..22: mol_type = other DNA
gccgcggggagccccgcttcat

SEQ ID NO: 21170 - DNA, 22 bp, synthetic construct
  misc_feature 1..22: note = Artificial sequence related to HLA knockouts in cell therapy
  source 1..22: mol_type = other DNA
ccgcggggagccccgcttcatc

SEQ ID NO: 21171 - DNA, 22 bp, synthetic construct
  misc_feature 1..22: note = Artificial sequence related to HLA knockouts in cell therapy
  source 1..22: mol_type = other DNA
cgcggggagccccgcttcatcg

SEQ ID NO: 21172 - DNA, 22 bp, synthetic construct
  misc_feature 1..22: note = Artificial sequence related to HLA knockouts in cell therapy
  source 1..22: mol_type = other DNA
gcggggagccccgcttcatcgc

SEQ ID NO: 21173 - DNA, 22 bp, synthetic construct
  misc_feature 1..22: note = Artificial sequence related to HLA knockouts in cell therapy
  source 1..22: mol_type = other DNA
cggggagccccgcttcatcgca

SEQ ID NO: 21174 - DNA, 22 bp, synthetic construct
  misc_feature 1..22: note = Artificial sequence related to HLA knockouts in cell therapy
  source 1..22: mol_type = other DNA
ggggagccccgcttcatcgcag

SEQ ID NO: 21175 - DNA, 22 bp, synthetic construct
  misc_feature 1..22: note = Artificial sequence related to HLA knockouts in cell therapy
  source 1..22: mol_type = other DNA
gggagccccgcttcatcgcagt

SEQ ID NO: 21176 - DNA, 22 bp, synthetic construct
  misc_feature 1..22: note = Artificial sequence related to HLA knockouts in cell therapy
  source 1..22: mol_type = other DNA
ggagccccgcttcatcgcagtg

SEQ ID NO: 21177 - DNA, 22 bp, synthetic construct
  misc_feature 1..22: note = Artificial sequence related to HLA knockouts in cell therapy
  source 1..22: mol_type = other DNA
gagccccgcttcatcgcagtgg

SEQ ID NO: 21178 - DNA, 22 bp, synthetic construct
  misc_feature 1..22: note = Artificial sequence related to HLA knockouts in cell therapy
  source 1..22: mol_type = other DNA
agccccgcttcatcgcagtggg

SEQ ID NO: 21179 - DNA, 22 bp, synthetic construct
  misc_feature 1..22: note = Artificial sequence related to HLA knockouts in cell therapy
  source 1..22: mol_type = other DNA
gccccgcttcatcgcagtgggc

SEQ ID NO: 21180 - DNA, 22 bp, synthetic construct
  misc_feature 1..22: note = Artificial sequence related to HLA knockouts in cell therapy
  source 1..22: mol_type = other DNA
ccccgcttcatcgcagtgggct

SEQ ID NO: 21181 - DNA, 22 bp, synthetic construct
  misc_feature 1..22: note = Artificial sequence related to HLA knockouts in cell therapy
  source 1..22: mol_type = other DNA
cccgcttcatcgcagtgggcta

SEQ ID NO: 21182 - DNA, 22 bp, synthetic construct
  misc_feature 1..22: note = Artificial sequence related to HLA knockouts in cell therapy
  source 1..22: mol_type = other DNA
ccgcttcatcgcagtgggctac

SEQ ID NO: 21183 - DNA, 22 bp, synthetic construct
  misc_feature 1..22: note = Artificial sequence related to HLA knockouts in cell therapy
  source 1..22: mol_type = other DNA
cgcttcatcgcagtgggctacg

SEQ ID NO: 21184 - DNA, 22 bp, synthetic construct
  misc_feature 1..22: note = Artificial sequence related to HLA knockouts in cell therapy
  source 1..22: mol_type = other DNA
catcgcagtgggctacgtggac

SEQ ID NO: 21185 - DNA, 22 bp, synthetic construct
  misc_feature 1..22: note = Artificial sequence related to HLA knockouts in cell therapy
  source 1..22: mol_type = other DNA
atcgcagtgggctacgtggacg

SEQ ID NO: 21186 - DNA, 22 bp, synthetic construct
  misc_feature 1..22: note = Artificial sequence related to HLA knockouts in cell therapy
  source 1..22: mol_type = other DNA
tcgcagtgggctacgtggacga

SEQ ID NO: 21187 - DNA, 22 bp, synthetic construct
  misc_feature 1..22: note = Artificial sequence related to HLA knockouts in cell therapy
  source 1..22: mol_type = other DNA
cgcagtgggctacgtggacgac

SEQ ID NO: 21188 - DNA, 22 bp, synthetic construct
  misc_feature 1..22: note = Artificial sequence related to HLA knockouts in cell therapy
  source 1..22: mol_type = other DNA
gcagtgggctacgtggacgaca

SEQ ID NO: 21189 - DNA, 22 bp, synthetic construct
  misc_feature 1..22: note = Artificial sequence related to HLA knockouts in cell therapy
  source 1..22: mol_type = other DNA
cagtgggctacgtggacgacac

SEQ ID NO: 21190 - DNA, 22 bp, synthetic construct
  misc_feature 1..22: note = Artificial sequence related to HLA knockouts in cell therapy
  source 1..22: mol_type = other DNA
agtgggctacgtggacgacacg

SEQ ID NO: 21191 - DNA, 22 bp, synthetic construct
  misc_feature 1..22: note = Artificial sequence related to HLA knockouts in cell therapy
  source 1..22: mol_type = other DNA
gtgggctacgtggacgacacgc

SEQ ID NO: 21192 - DNA, 22 bp, synthetic construct
  misc_feature 1..22: note = Artificial sequence related to HLA knockouts in cell therapy
  source 1..22: mol_type = other DNA
tgggctacgtggacgacacgca

SEQ ID NO: 21193 - DNA, 22 bp, synthetic construct
  misc_feature 1..22: note = Artificial sequence related to HLA knockouts in cell therapy
  source 1..22: mol_type = other DNA
gggctacgtggacgacacgcag

SEQ ID NO: 21194 - DNA, 22 bp, synthetic construct
  misc_feature 1..22: note = Artificial sequence related to HLA knockouts in cell therapy
  source 1..22: mol_type = other DNA
ggctacgtggacgacacgcagt

SEQ ID NO: 21195 - DNA, 22 bp, synthetic construct
  misc_feature 1..22: note = Artificial sequence related to HLA knockouts in cell therapy
  source 1..22: mol_type = other DNA
cgtggacgacacgcagttcgtg

SEQ ID NO: 21196 - DNA, 22 bp, synthetic construct
  misc_feature 1..22: note = Artificial sequence related to HLA knockouts in cell therapy
  source 1..22: mol_type = other DNA
gtggacgacacgcagttcgtgc

SEQ ID NO: 21197 - DNA, 22 bp, synthetic construct
  misc_feature 1..22: note = Artificial sequence related to HLA knockouts in cell therapy
  source 1..22: mol_type = other DNA
tggacgacacgcagttcgtgcg

SEQ ID NO: 21198 - DNA, 22 bp, synthetic construct
  misc_feature 1..22: note = Artificial sequence related to HLA knockouts in cell therapy
  source 1..22: mol_type = other DNA
ggacgacacgcagttcgtgcgg

SEQ ID NO: 21199 - DNA, 22 bp, synthetic construct
  misc_feature 1..22: note = Artificial sequence related to HLA knockouts in cell therapy
  source 1..22: mol_type = other DNA
gacgacacgcagttcgtgcggt

SEQ ID NO: 21200 - DNA, 22 bp, synthetic construct
  misc_feature 1..22: note = Artificial sequence related to HLA knockouts in cell therapy
  source 1..22: mol_type = other DNA
cgacacgcagttcgtgcggttc

SEQ ID NO: 21201 - DNA, 22 bp, synthetic construct
  misc_feature 1..22: note = Artificial sequence related to HLA knockouts in cell therapy
  source 1..22: mol_type = other DNA
gacacgcagttcgtgcggttcg

SEQ ID NO: 21202 - DNA, 22 bp, synthetic construct
  misc_feature 1..22: note = Artificial sequence related to HLA knockouts in cell therapy
  source 1..22: mol_type = other DNA
cacgcagttcgtgcggttcgac

SEQ ID NO: 21203 - DNA, 22 bp, synthetic construct
  misc_feature 1..22: note = Artificial sequence related to HLA knockouts in cell therapy
  source 1..22: mol_type = other DNA
cgcagttcgtgcggttcgacag

SEQ ID NO: 21204 - DNA, 22 bp, synthetic construct
  misc_feature 1..22: note = Artificial sequence related to HLA knockouts in cell therapy
  source 1..22: mol_type = other DNA
gcagttcgtgcggttcgacagc

SEQ ID NO: 21205 - DNA, 22 bp, synthetic construct
  misc_feature 1..22: note = Artificial sequence related to HLA knockouts in cell therapy
  source 1..22: mol_type = other DNA
cagttcgtgcggttcgacagcg

SEQ ID NO: 21206 - DNA, 22 bp, synthetic construct
  misc_feature 1..22: note = Artificial sequence related to HLA knockouts in cell therapy
  source 1..22: mol_type = other DNA
gttcgtgcggttcgacagcgac

SEQ ID NO: 21207 - DNA, 22 bp, synthetic construct
  misc_feature 1..22: note = Artificial sequence related to HLA knockouts in cell therapy
  source 1..22: mol_type = other DNA
ttcgtgcggttcgacagcgacg

SEQ ID NO: 21208 - DNA, 22 bp, synthetic construct
  misc_feature 1..22: note = Artificial sequence related to HLA knockouts in cell therapy
  source 1..22: mol_type = other DNA
tcgtgcggttcgacagcgacgc

SEQ ID NO: 21209 - DNA, 22 bp, synthetic construct
  misc_feature 1..22: note = Artificial sequence related to HLA knockouts in cell therapy
  source 1..22: mol_type = other DNA
cgtgcggttcgacagcgacgcc

SEQ ID NO: 21210 - DNA, 22 bp, synthetic construct
  misc_feature 1..22: note = Artificial sequence related to HLA knockouts in cell therapy
  source 1..22: mol_type = other DNA
gtgcggttcgacagcgacgccg

SEQ ID NO: 21211 - DNA, 22 bp, synthetic construct
  misc_feature 1..22: note = Artificial sequence related to HLA knockouts in cell therapy
  source 1..22: mol_type = other DNA
tgcggttcgacagcgacgccgc

SEQ ID NO: 21212 - DNA, 22 bp, synthetic construct
  misc_feature 1..22: note = Artificial sequence related to HLA knockouts in cell therapy
  source 1..22: mol_type = other DNA
gcggttcgacagcgacgccgcg

SEQ ID NO: 21213 - DNA, 22 bp, synthetic construct
  misc_feature 1..22: note = Artificial sequence related to HLA knockouts in cell therapy
  source 1..22: mol_type = other DNA
cggttcgacagcgacgccgcga

SEQ ID NO: 21214 - DNA, 22 bp, synthetic construct
  misc_feature 1..22: note = Artificial sequence related to HLA knockouts in cell therapy
  source 1..22: mol_type = other DNA
ggttcgacagcgacgccgcgag

SEQ ID NO: 21215 - DNA, 22 bp, synthetic construct
  misc_feature 1..22: note = Artificial sequence related to HLA knockouts in cell therapy
  source 1..22: mol_type = other DNA
gttcgacagcgacgccgcgagc

SEQ ID NO: 21216 - DNA, 22 bp, synthetic construct
  misc_feature 1..22: note = Artificial sequence related to HLA knockouts in cell therapy
  source 1..22: mol_type = other DNA
ttcgacagcgacgccgcgagcc

SEQ ID NO: 21217 - DNA, 22 bp, synthetic construct
  misc_feature 1..22: note = Artificial sequence related to HLA knockouts in cell therapy
  source 1..22: mol_type = other DNA
tcgacagcgacgccgcgagcca

SEQ ID NO: 21218 - DNA, 22 bp, synthetic construct
  misc_feature 1..22: note = Artificial sequence related to HLA knockouts in cell therapy
  source 1..22: mol_type = other DNA
cgacagcgacgccgcgagccag

SEQ ID NO: 21219 - DNA, 22 bp, synthetic construct
  misc_feature 1..22: note = Artificial sequence related to HLA knockouts in cell therapy
  source 1..22: mol_type = other DNA
gacagcgacgccgcgagccaga

SEQ ID NO: 21220 - DNA, 22 bp, synthetic construct
  misc_feature 1..22: note = Artificial sequence related to HLA knockouts in cell therapy
  source 1..22: mol_type = other DNA
acagcgacgccgcgagccagag

SEQ ID NO: 21221 - DNA, 22 bp, synthetic construct
  misc_feature 1..22: note = Artificial sequence related to HLA knockouts in cell therapy
  source 1..22: mol_type = other DNA
cagcgacgccgcgagccagagg

SEQ ID NO: 21222 - DNA, 22 bp, synthetic construct
  misc_feature 1..22: note = Artificial sequence related to HLA knockouts in cell therapy
  source 1..22: mol_type = other DNA
agcgacgccgcgagccagagga

SEQ ID NO: 21223 - DNA, 22 bp, synthetic construct
  misc_feature 1..22: note = Artificial sequence related to HLA knockouts in cell therapy
  source 1..22: mol_type = other DNA
gcgacgccgcgagccagaggat

SEQ ID NO: 21224 - DNA, 22 bp, synthetic construct
  misc_feature 1..22: note = Artificial sequence related to HLA knockouts in cell therapy
  source 1..22: mol_type = other DNA
cgacgccgcgagccagaggatg

SEQ ID NO: 21225 - DNA, 22 bp, synthetic construct
  misc_feature 1..22: note = Artificial sequence related to HLA knockouts in cell therapy
  source 1..22: mol_type = other DNA
gacgccgcgagccagaggatgg

SEQ ID NO: 21226 - DNA, 22 bp, synthetic construct
  misc_feature 1..22: note = Artificial sequence related to HLA knockouts in cell therapy
  source 1..22: mol_type = other DNA
acgccgcgagccagaggatgga

SEQ ID NO: 21227 - DNA, 22 bp, synthetic construct
  misc_feature 1..22: note = Artificial sequence related to HLA knockouts in cell therapy
  source 1..22: mol_type = other DNA
cgccgcgagccagaggatggag

SEQ ID NO: 21228 - DNA, 22 bp, synthetic construct
  misc_feature 1..22: note = Artificial sequence related to HLA knockouts in cell therapy
  source 1..22: mol_type = other DNA
gccgcgagccagaggatggagc

SEQ ID NO: 21229 - DNA, 22 bp, synthetic construct
  misc_feature 1..22: note = Artificial sequence related to HLA knockouts in cell therapy
  source 1..22: mol_type = other DNA
ccgcgagccagaggatggagcc

SEQ ID NO: 21230 - DNA, 22 bp, synthetic construct
  misc_feature 1..22: note = Artificial sequence related to HLA knockouts in cell therapy
  source 1..22: mol_type = other DNA
cgcgagccagaggatggagccg

SEQ ID NO: 21231 - DNA, 22 bp, synthetic construct
  misc_feature 1..22: note = Artificial sequence related to HLA knockouts in cell therapy
  source 1..22: mol_type = other DNA
gcgagccagaggatggagccgc

SEQ ID NO: 21232 - DNA, 22 bp, synthetic construct
  misc_feature 1..22: note = Artificial sequence related to HLA knockouts in cell therapy
  source 1..22: mol_type = other DNA
cgagccagaggatggagccgcg

SEQ ID NO: 21233 - DNA, 22 bp, synthetic construct
  misc_feature 1..22: note = Artificial sequence related to HLA knockouts in cell therapy
  source 1..22: mol_type = other DNA
gagccagaggatggagccgcgg

SEQ ID NO: 21234 - DNA, 22 bp, synthetic construct
  misc_feature 1..22: note = Artificial sequence related to HLA knockouts in cell therapy
  source 1..22: mol_type = other DNA
agccagaggatggagccgcggg

SEQ ID NO: 21235 - DNA, 22 bp, synthetic construct
  misc_feature 1..22: note = Artificial sequence related to HLA knockouts in cell therapy
  source 1..22: mol_type = other DNA
gccagaggatggagccgcgggc

SEQ ID NO: 21236 - DNA, 22 bp, synthetic construct
  misc_feature 1..22: note = Artificial sequence related to HLA knockouts in cell therapy
  source 1..22: mol_type = other DNA
ccagaggatggagccgcgggcg

SEQ ID NO: 21237 - DNA, 22 bp, synthetic construct
  misc_feature 1..22: note = Artificial sequence related to HLA knockouts in cell therapy
  source 1..22: mol_type = other DNA
cagaggatggagccgcgggcgc

SEQ ID NO: 21238 - DNA, 22 bp, synthetic construct
  misc_feature 1..22: note = Artificial sequence related to HLA knockouts in cell therapy
  source 1..22: mol_type = other DNA
agaggatggagccgcgggcgcc

SEQ ID NO: 21239 - DNA, 22 bp, synthetic construct
  misc_feature 1..22: note = Artificial sequence related to HLA knockouts in cell therapy
  source 1..22: mol_type = other DNA
gaggatggagccgcgggcgccg

SEQ ID NO: 21240 - DNA, 22 bp, synthetic construct
  misc_feature 1..22: note = Artificial sequence related to HLA knockouts in cell therapy
  source 1..22: mol_type = other DNA
aggatggagccgcgggcgccgt

SEQ ID NO: 21241 - DNA, 22 bp, synthetic construct
  misc_feature 1..22: note = Artificial sequence related to HLA knockouts in cell therapy
  source 1..22: mol_type = other DNA
ggatggagccgcgggcgccgtg

SEQ ID NO: 21242 - DNA, 22 bp, synthetic construct
  misc_feature 1..22: note = Artificial sequence related to HLA knockouts in cell therapy
  source 1..22: mol_type = other DNA
gatggagccgcgggcgccgtgg

SEQ ID NO: 21243 - DNA, 22 bp, synthetic construct
  misc_feature 1..22: note = Artificial sequence related to HLA knockouts in cell therapy
  source 1..22: mol_type = other DNA
atggagccgcgggcgccgtgga

SEQ ID NO: 21244 - DNA, 22 bp, synthetic construct
  misc_feature 1..22: note = Artificial sequence related to HLA knockouts in cell therapy
  source 1..22: mol_type = other DNA
tggagccgcgggcgccgtggat

SEQ ID NO: 21245 - DNA, 22 bp, synthetic construct
  misc_feature 1..22: note = Artificial sequence related to HLA knockouts in cell therapy
  source 1..22: mol_type = other DNA
ggagccgcgggcgccgtggata

SEQ ID NO: 21246 - DNA, 22 bp, synthetic construct
  misc_feature 1..22: note = Artificial sequence related to HLA knockouts in cell therapy
  source 1..22: mol_type = other DNA
gagccgcgggcgccgtggatag

SEQ ID NO: 21247 - DNA, 22 bp, synthetic construct
  misc_feature 1..22: note = Artificial sequence related to HLA knockouts in cell therapy
  source 1..22: mol_type = other DNA
agccgcgggcgccgtggataga

SEQ ID NO: 21248 - DNA, 22 bp, synthetic construct
  misc_feature 1..22: note = Artificial sequence related to HLA knockouts in cell therapy
  source 1..22: mol_type = other DNA
gccgcgggcgccgtggatagag

SEQ ID NO: 21249 - DNA, 22 bp, synthetic construct
  misc_feature 1..22: note = Artificial sequence related to HLA knockouts in cell therapy
  source 1..22: mol_type = other DNA
ccgcgggcgccgtggatagagc

SEQ ID NO: 21250 - DNA, 22 bp, synthetic construct
  misc_feature 1..22: note = Artificial sequence related to HLA knockouts in cell therapy
  source 1..22: mol_type = other DNA
cgcgggcgccgtggatagagca

SEQ ID NO: 21251 - DNA, 22 bp, synthetic construct
  misc_feature 1..22: note = Artificial sequence related to HLA knockouts in cell therapy
  source 1..22: mol_type = other DNA
gcgggcgccgtggatagagcag

SEQ ID NO: 21252 - DNA, 22 bp, synthetic construct
  misc_feature 1..22: note = Artificial sequence related to HLA knockouts in cell therapy
  source 1..22: mol_type = other DNA
cgggcgccgtggatagagcagg

SEQ ID NO: 21253 - DNA, 22 bp, synthetic construct
  misc_feature 1..22: note = Artificial sequence related to HLA knockouts in cell therapy
  source 1..22: mol_type = other DNA
gggcgccgtggatagagcagga

SEQ ID NO: 21254 - DNA, 22 bp, synthetic construct
  misc_feature 1..22: note = Artificial sequence related to HLA knockouts in cell therapy
  source 1..22: mol_type = other DNA
ggcgccgtggatagagcaggag

SEQ ID NO: 21255 - DNA, 22 bp, synthetic construct
  misc_feature 1..22: note = Artificial sequence related to HLA knockouts in cell therapy
  source 1..22: mol_type = other DNA
gcgccgtggatagagcaggagg

SEQ ID NO: 21256 - DNA, 22 bp, synthetic construct
  misc_feature 1..22: note = Artificial sequence related to HLA knockouts in cell therapy
  source 1..22: mol_type = other DNA
cgccgtggatagagcaggaggg

SEQ ID NO: 21257 - DNA, 22 bp, synthetic construct
  misc_feature 1..22: note = Artificial sequence related to HLA knockouts in cell therapy
  source 1..22: mol_type = other DNA
gccgtggatagagcaggagggt

SEQ ID NO: 21258 - DNA, 22 bp, synthetic construct
  misc_feature 1..22: note = Artificial sequence related to HLA knockouts in cell therapy
  source 1..22: mol_type = other DNA
ccgtggatagagcaggagggtc

SEQ ID NO: 21259 - DNA, 22 bp, synthetic construct
  misc_feature 1..22: note = Artificial sequence related to HLA knockouts in cell therapy
  source 1..22: mol_type = other DNA
cgtggatagagcaggagggtcc

SEQ ID NO: 21260 - DNA, 22 bp, synthetic construct
  misc_feature 1..22: note = Artificial sequence related to HLA knockouts in cell therapy
  source 1..22: mol_type = other DNA
gtggatagagcaggagggtccg

SEQ ID NO: 21261 - DNA, 22 bp, synthetic construct
  misc_feature 1..22: note = Artificial sequence related to HLA knockouts in cell therapy
  source 1..22: mol_type = other DNA
tggatagagcaggagggtccgg

SEQ ID NO: 21262 - DNA, 22 bp, synthetic construct
  misc_feature 1..22: note = Artificial sequence related to HLA knockouts in cell therapy
  source 1..22: mol_type = other DNA
ggatagagcaggagggtccgga

SEQ ID NO: 21263 - DNA, 22 bp, synthetic construct
  misc_feature 1..22: note = Artificial sequence related to HLA knockouts in cell therapy
  source 1..22: mol_type = other DNA
gatagagcaggagggtccggag

SEQ ID NO: 21264 - DNA, 22 bp, synthetic construct
  misc_feature 1..22: note = Artificial sequence related to HLA knockouts in cell therapy
  source 1..22: mol_type = other DNA
gcaggagggtccggagtattgg

SEQ ID NO: 21265 - DNA, 22 bp, synthetic construct
  misc_feature 1..22: note = Artificial sequence related to HLA knockouts in cell therapy
  source 1..22: mol_type = other DNA
caggagggtccggagtattggg

SEQ ID NO: 21266 - DNA, 22 bp, synthetic construct
  misc_feature 1..22: note = Artificial sequence related to HLA knockouts in cell therapy
  source 1..22: mol_type = other DNA
ggagggtccggagtattgggac

SEQ ID NO: 21267 - DNA, 22 bp, synthetic construct
  misc_feature 1..22: note = Artificial sequence related to HLA knockouts in cell therapy
  source 1..22: mol_type = other DNA
gagggtccggagtattgggacg

SEQ ID NO: 21268 - DNA, 22 bp, synthetic construct
  misc_feature 1..22: note = Artificial sequence related to HLA knockouts in cell therapy
  source 1..22: mol_type = other DNA
agggtccggagtattgggacgg

SEQ ID NO: 21269 - DNA, 22 bp, synthetic construct
  misc_feature 1..22: note = Artificial sequence related to HLA knockouts in cell therapy
  source 1..22: mol_type = other DNA
gggtccggagtattgggacggg

SEQ ID NO: 21270 - DNA, 22 bp, synthetic construct
  misc_feature 1..22: note = Artificial sequence related to HLA knockouts in cell therapy
  source 1..22: mol_type = other DNA
ggtccggagtattgggacgggg

SEQ ID NO: 21271 - DNA, 22 bp, synthetic construct
  misc_feature 1..22: note = Artificial sequence related to HLA knockouts in cell therapy
  source 1..22: mol_type = other DNA
gtccggagtattgggacgggga

SEQ ID NO: 21272 - DNA, 22 bp, synthetic construct
  misc_feature 1..22: note = Artificial sequence related to HLA knockouts in cell therapy
  source 1..22: mol_type = other DNA
tccggagtattgggacggggag

SEQ ID NO: 21273 - DNA, 22 bp, synthetic construct
  misc_feature 1..22: note = Artificial sequence related to HLA knockouts in cell therapy
  source 1..22: mol_type = other DNA
ccggagtattgggacggggaga

SEQ ID NO: 21274 - DNA, 22 bp, synthetic construct
  misc_feature 1..22: note = Artificial sequence related to HLA knockouts in cell therapy
  source 1..22: mol_type = other DNA
cggagtattgggacggggagac

SEQ ID NO: 21275 - DNA, 22 bp, synthetic construct
  misc_feature 1..22: note = Artificial sequence related to HLA knockouts in cell therapy
  source 1..22: mol_type = other DNA
gtattgggacggggagacacgg

SEQ ID NO: 21276 - DNA, 22 bp, synthetic construct
  misc_feature 1..22: note = Artificial sequence related to HLA knockouts in cell therapy
  source 1..22: mol_type = other DNA
tgggacggggagacacggaaag

SEQ ID NO: 21277 - DNA, 22 bp, synthetic construct
  misc_feature 1..22: note = Artificial sequence related to HLA knockouts in cell therapy
  source 1..22: mol_type = other DNA
gggacggggagacacggaaagt

SEQ ID NO: 21278 - DNA, 22 bp, synthetic construct
  misc_feature 1..22: note = Artificial sequence related to HLA knockouts in cell therapy
  source 1..22: mol_type = other DNA
ggacggggagacacggaaagtg

SEQ ID NO: 21279 - DNA, 22 bp, synthetic construct
  misc_feature 1..22: note = Artificial sequence related to HLA knockouts in cell therapy
  source 1..22: mol_type = other DNA
aggcccactcacagactcaccg

SEQ ID NO: 21280 - DNA, 22 bp, synthetic construct
  misc_feature 1..22: note = Artificial sequence related to HLA knockouts in cell therapy
  source 1..22: mol_type = other DNA
ggcccactcacagactcaccga

SEQ ID NO: 21281 - DNA, 22 bp, synthetic construct
  misc_feature 1..22: note = Artificial sequence related to HLA knockouts in cell therapy
  source 1..22: mol_type = other DNA
gcccactcacagactcaccgag

SEQ ID NO: 21282 - DNA, 22 bp, synthetic construct
  misc_feature 1..22: note = Artificial sequence related to HLA knockouts in cell therapy
  source 1..22: mol_type = other DNA
cagactcaccgagtggacctgg

SEQ ID NO: 21283 - DNA, 22 bp, synthetic construct
  misc_feature 1..22: note = Artificial sequence related to HLA knockouts in cell therapy
  source 1..22: mol_type = other DNA
agactcaccgagtggacctggg

SEQ ID NO: 21284 - DNA, 22 bp, synthetic construct
  misc_feature 1..22: note = Artificial sequence related to HLA knockouts in cell therapy
  source 1..22: mol_type = other DNA
gactcaccgagtggacctgggg

SEQ ID NO: 21285 - DNA, 22 bp, synthetic construct
  misc_feature 1..22: note = Artificial sequence related to HLA knockouts in cell therapy
  source 1..22: mol_type = other DNA
actcaccgagtggacctgggga

SEQ ID NO: 21286 - DNA, 22 bp, synthetic construct
  misc_feature 1..22: note = Artificial sequence related to HLA knockouts in cell therapy
  source 1..22: mol_type = other DNA
ctcaccgagtggacctggggac

SEQ ID NO: 21287 - DNA, 22 bp, synthetic construct
  misc_feature 1..22: note = Artificial sequence related to HLA knockouts in cell therapy
  source 1..22: mol_type = other DNA
tcaccgagtggacctggggacc

SEQ ID NO: 21288 - DNA, 22 bp, synthetic construct
  misc_feature 1..22: note = Artificial sequence related to HLA knockouts in cell therapy
  source 1..22: mol_type = other DNA
caccgagtggacctggggaccc

SEQ ID NO: 21289 - DNA, 22 bp, synthetic construct
  misc_feature 1..22: note = Artificial sequence related to HLA knockouts in cell therapy
  source 1..22: mol_type = other DNA
accgagtggacctggggaccct

SEQ ID NO: 21290 - DNA, 22 bp, synthetic construct
  misc_feature 1..22: note = Artificial sequence related to HLA knockouts in cell therapy
  source 1..22: mol_type = other DNA
ccgagtggacctggggaccctg

SEQ ID NO: 21291 - DNA, 22 bp, synthetic construct
  misc_feature 1..22: note = Artificial sequence related to HLA knockouts in cell therapy
  source 1..22: mol_type = other DNA
cgagtggacctggggaccctgc

SEQ ID NO: 21292 - DNA, 22 bp, synthetic construct
  misc_feature 1..22: note = Artificial sequence related to HLA knockouts in cell therapy
  source 1..22: mol_type = other DNA
gagtggacctggggaccctgcg

SEQ ID NO: 21293 - DNA, 22 bp, synthetic construct
  misc_feature 1..22: note = Artificial sequence related to HLA knockouts in cell therapy
  source 1..22: mol_type = other DNA
agtggacctggggaccctgcgc

SEQ ID NO: 21294 - DNA, 22 bp, synthetic construct
  misc_feature 1..22: note = Artificial sequence related to HLA knockouts in cell therapy
  source 1..22: mol_type = other DNA
gtggacctggggaccctgcgcg

SEQ ID NO: 21295 - DNA, 22 bp, synthetic construct
  misc_feature 1..22: note = Artificial sequence related to HLA knockouts in cell therapy
  source 1..22: mol_type = other DNA
tggacctggggaccctgcgcgg

SEQ ID NO: 21296 - DNA, 22 bp, synthetic construct
  misc_feature 1..22: note = Artificial sequence related to HLA knockouts in cell therapy
  source 1..22: mol_type = other DNA
ggacctggggaccctgcgcggc

SEQ ID NO: 21297 - DNA, 22 bp, synthetic construct
  misc_feature 1..22: note = Artificial sequence related to HLA knockouts in cell therapy
  source 1..22: mol_type = other DNA
gacctggggaccctgcgcggct

SEQ ID NO: 21298 - DNA, 22 bp, synthetic construct
  misc_feature 1..22: note = Artificial sequence related to HLA knockouts in cell therapy
  source 1..22: mol_type = other DNA
acctggggaccctgcgcggcta

SEQ ID NO: 21299 - DNA, 22 bp, synthetic construct
  misc_feature 1..22: note = Artificial sequence related to HLA knockouts in cell therapy
  source 1..22: mol_type = other DNA
cctggggaccctgcgcggctac

SEQ ID NO: 21300 - DNA, 22 bp, synthetic construct
  misc_feature 1..22: note = Artificial sequence related to HLA knockouts in cell therapy
  source 1..22: mol_type = other DNA
ctggggaccctgcgcggctact

SEQ ID NO: 21301 - DNA, 22 bp, synthetic construct
  misc_feature 1..22: note = Artificial sequence related to HLA knockouts in cell therapy
  source 1..22: mol_type = other DNA
tggggaccctgcgcggctacta

SEQ ID NO: 21302 - DNA, 22 bp, synthetic construct
  misc_feature 1..22: note = Artificial sequence related to HLA knockouts in cell therapy
  source 1..22: mol_type = other DNA
ggggaccctgcgcggctactac

SEQ ID NO: 21303 - DNA, 22 bp, synthetic construct
  misc_feature 1..22: note = Artificial sequence related to HLA knockouts in cell therapy
  source 1..22: mol_type = other DNA
gggaccctgcgcggctactaca

SEQ ID NO: 21304 - DNA, 22 bp, synthetic construct
  misc_feature 1..22: note = Artificial sequence related to HLA knockouts in cell therapy
  source 1..22: mol_type = other DNA
ggaccctgcgcggctactacaa

SEQ ID NO: 21305 - DNA, 22 bp, synthetic construct
  misc_feature 1..22: note = Artificial sequence related to HLA knockouts in cell therapy
  source 1..22: mol_type = other DNA
gaccctgcgcggctactacaac

SEQ ID NO: 21306 - DNA, 22 bp, synthetic construct
  misc_feature 1..22: note = Artificial sequence related to HLA knockouts in cell therapy
  source 1..22: mol_type = other DNA
accctgcgcggctactacaacc

SEQ ID NO: 21307 - DNA, 22 bp, synthetic construct
  misc_feature 1..22: note = Artificial sequence related to HLA knockouts in cell therapy
  source 1..22: mol_type = other DNA
ccctgcgcggctactacaacca

SEQ ID NO: 21308 - DNA, 22 bp, synthetic construct
  misc_feature 1..22: note = Artificial sequence related to HLA knockouts in cell therapy
  source 1..22: mol_type = other DNA
cctgcgcggctactacaaccag

SEQ ID NO: 21309 - DNA, 22 bp, synthetic construct
  misc_feature 1..22: note = Artificial sequence related to HLA knockouts in cell therapy
  source 1..22: mol_type = other DNA
gcgcggctactacaaccagagc

SEQ ID NO: 21310 - DNA, 22 bp, synthetic construct
  misc_feature 1..22: note = Artificial sequence related to HLA knockouts in cell therapy
  source 1..22: mol_type = other DNA
cgcggctactacaaccagagcg

SEQ ID NO: 21311 - DNA, 22 bp, synthetic construct
  misc_feature 1..22: note = Artificial sequence related to HLA knockouts in cell therapy
  source 1..22: mol_type = other DNA
actacaaccagagcgaggccgg

SEQ ID NO: 21312 - DNA, 22 bp, synthetic construct
  misc_feature 1..22: note = Artificial sequence related to HLA knockouts in cell therapy
  source 1..22: mol_type = other DNA
ctacaaccagagcgaggccggt

SEQ ID NO: 21313 - DNA, 22 bp, synthetic construct
  misc_feature 1..22: note = Artificial sequence related to HLA knockouts in cell therapy
  source 1..22: mol_type = other DNA
acaaccagagcgaggccggttc

SEQ ID NO: 21314 - DNA, 22 bp, synthetic construct
  misc_feature 1..22: note = Artificial sequence related to HLA knockouts in cell therapy
  source 1..22: mol_type = other DNA
caaccagagcgaggccggttct

SEQ ID NO: 21315 - DNA, 22 bp, synthetic construct
  misc_feature 1..22: note = Artificial sequence related to HLA knockouts in cell therapy
  source 1..22: mol_type = other DNA
aaccagagcgaggccggttctc

SEQ ID NO: 21316 - DNA, 22 bp, synthetic construct
  misc_feature 1..22: note = Artificial sequence related to HLA knockouts in cell therapy
  source 1..22: mol_type = other DNA
accagagcgaggccggttctca

SEQ ID NO: 21317 - DNA, 22 bp, synthetic construct
  misc_feature 1..22: note = Artificial sequence related to HLA knockouts in cell therapy
  source 1..22: mol_type = other DNA
ccagagcgaggccggttctcac

SEQ ID NO: 21318 - DNA, 22 bp, synthetic construct
  misc_feature 1..22: note = Artificial sequence related to HLA knockouts in cell therapy
  source 1..22: mol_type = other DNA
cagagcgaggccggttctcaca

SEQ ID NO: 21319 - DNA, 22 bp, synthetic construct
  misc_feature 1..22: note = Artificial sequence related to HLA knockouts in cell therapy
  source 1..22: mol_type = other DNA
agagcgaggccggttctcacac

SEQ ID NO: 21320 - DNA, 22 bp, synthetic construct
  misc_feature 1..22: note = Artificial sequence related to HLA knockouts in cell therapy
  source 1..22: mol_type = other DNA
gagcgaggccggttctcacacc

SEQ ID NO: 21321 - DNA, 22 bp, synthetic construct
  misc_feature 1..22: note = Artificial sequence related to HLA knockouts in cell therapy
  source 1..22: mol_type = other DNA
agcgaggccggttctcacaccg

SEQ ID NO: 21322 - DNA, 22 bp, synthetic construct
  misc_feature 1..22: note = Artificial sequence related to HLA knockouts in cell therapy
  source 1..22: mol_type = other DNA
gcgaggccggttctcacaccgt

SEQ ID NO: 21323 - DNA, 22 bp, synthetic construct
  misc_feature 1..22: note = Artificial sequence related to HLA knockouts in cell therapy
  source 1..22: mol_type = other DNA
cgaggccggttctcacaccgtc

SEQ ID NO: 21324 - DNA, 22 bp, synthetic construct
  misc_feature 1..22: note = Artificial sequence related to HLA knockouts in cell therapy
  source 1..22: mol_type = other DNA
gaggccggttctcacaccgtcc

SEQ ID NO: 21325 - DNA, 22 bp, synthetic construct
  misc_feature 1..22: note = Artificial sequence related to HLA knockouts in cell therapy
  source 1..22: mol_type = other DNA
aggccggttctcacaccgtcca

SEQ ID NO: 21326 - DNA, 22 bp, synthetic construct
  misc_feature 1..22: note = Artificial sequence related to HLA knockouts in cell therapy
  source 1..22: mol_type = other DNA
ggccggttctcacaccgtccag

SEQ ID NO: 21327 - DNA, 22 bp, synthetic construct
  misc_feature 1..22: note = Artificial sequence related to HLA knockouts in cell therapy
  source 1..22: mol_type = other DNA
gccggttctcacaccgtccaga

SEQ ID NO: 21328 - DNA, 22 bp, synthetic construct
  misc_feature 1..22: note = Artificial sequence related to HLA knockouts in cell therapy
  source 1..22: mol_type = other DNA
ccggttctcacaccgtccagag

SEQ ID NO: 21329 - DNA, 22 bp, synthetic construct
  misc_feature 1..22: note = Artificial sequence related to HLA knockouts in cell therapy
  source 1..22: mol_type = other DNA
cggttctcacaccgtccagagg

SEQ ID NO: 21330 - DNA, 22 bp, synthetic construct
  misc_feature 1..22: note = Artificial sequence related to HLA knockouts in cell therapy
  source 1..22: mol_type = other DNA
ggatgtatggctgcgacgtggg

SEQ ID NO: 21331 - DNA, 22 bp, synthetic construct
  misc_feature 1..22: note = Artificial sequence related to HLA knockouts in cell therapy
  source 1..22: mol_type = other DNA
gatgtatggctgcgacgtgggg

SEQ ID NO: 21332 - DNA, 22 bp, synthetic construct
  misc_feature 1..22: note = Artificial sequence related to HLA knockouts in cell therapy
  source 1..22: mol_type = other DNA
tgtatggctgcgacgtggggtc

SEQ ID NO: 21333 - DNA, 22 bp, synthetic construct
  misc_feature 1..22: note = Artificial sequence related to HLA knockouts in cell therapy
  source 1..22: mol_type = other DNA
gtatggctgcgacgtggggtcg

SEQ ID NO: 21334 - DNA, 22 bp, synthetic construct
  misc_feature 1..22: note = Artificial sequence related to HLA knockouts in cell therapy
  source 1..22: mol_type = other DNA
tatggctgcgacgtggggtcgg

SEQ ID NO: 21335 - DNA, 22 bp, synthetic construct
  misc_feature 1..22: note = Artificial sequence related to HLA knockouts in cell therapy
  source 1..22: mol_type = other DNA
atggctgcgacgtggggtcgga

SEQ ID NO: 21336 - DNA, 22 bp, synthetic construct
  misc_feature 1..22: note = Artificial sequence related to HLA knockouts in cell therapy
  source 1..22: mol_type = other DNA
tggctgcgacgtggggtcggac

SEQ ID NO: 21337 - DNA, 22 bp, synthetic construct
  misc_feature 1..22: note = Artificial sequence related to HLA knockouts in cell therapy
  source 1..22: mol_type = other DNA
ggctgcgacgtggggtcggact

SEQ ID NO: 21338 - DNA, 22 bp, synthetic construct
  misc_feature 1..22: note = Artificial sequence related to HLA knockouts in cell therapy
  source 1..22: mol_type = other DNA
gctgcgacgtggggtcggactg

SEQ ID NO: 21339 - DNA, 22 bp, synthetic construct
  misc_feature 1..22: note = Artificial sequence related to HLA knockouts in cell therapy
  source 1..22: mol_type = other DNA
ctgcgacgtggggtcggactgg

SEQ ID NO: 21340 - DNA, 22 bp, synthetic construct
  misc_feature 1..22: note = Artificial sequence related to HLA knockouts in cell therapy
  source 1..22: mol_type = other DNA
tgcgacgtggggtcggactggc

SEQ ID NO: 21341 - DNA, 22 bp, synthetic construct
  misc_feature 1..22: note = Artificial sequence related to HLA knockouts in cell therapy
  source 1..22: mol_type = other DNA
gcgacgtggggtcggactggcg

SEQ ID NO: 21342 - DNA, 22 bp, synthetic construct
  misc_feature 1..22: note = Artificial sequence related to HLA knockouts in cell therapy
  source 1..22: mol_type = other DNA
cgacgtggggtcggactggcgc

SEQ ID NO: 21343 - DNA, 22 bp, synthetic construct
  misc_feature 1..22: note = Artificial sequence related to HLA knockouts in cell therapy
  source 1..22: mol_type = other DNA
gacgtggggtcggactggcgct

SEQ ID NO: 21344 - DNA, 22 bp, synthetic construct
  misc_feature 1..22: note = Artificial sequence related to HLA knockouts in cell therapy
  source 1..22: mol_type = other DNA
acgtggggtcggactggcgctt

SEQ ID NO: 21345 - DNA, 22 bp, synthetic construct
  misc_feature 1..22: note = Artificial sequence related to HLA knockouts in cell therapy
  source 1..22: mol_type = other DNA
cgtggggtcggactggcgcttc

SEQ ID NO: 21346 - DNA, 22 bp, synthetic construct
  misc_feature 1..22: note = Artificial sequence related to HLA knockouts in cell therapy
  source 1..22: mol_type = other DNA
gtggggtcggactggcgcttcc

SEQ ID NO: 21347 - DNA, 22 bp, synthetic construct
  misc_feature 1..22: note = Artificial sequence related to HLA knockouts in cell therapy
  source 1..22: mol_type = other DNA
tggggtcggactggcgcttcct

SEQ ID NO: 21348 - DNA, 22 bp, synthetic construct
  misc_feature 1..22: note = Artificial sequence related to HLA knockouts in cell therapy
  source 1..22: mol_type = other DNA
ggggtcggactggcgcttcctc

SEQ ID NO: 21349 - DNA, 22 bp, synthetic construct
  misc_feature 1..22: note = Artificial sequence related to HLA knockouts in cell therapy
  source 1..22: mol_type = other DNA
gggtcggactggcgcttcctcc

SEQ ID NO: 21350 - DNA, 22 bp, synthetic construct
  misc_feature 1..22: note = Artificial sequence related to HLA knockouts in cell therapy
  source 1..22: mol_type = other DNA
ggtcggactggcgcttcctccg

SEQ ID NO: 21351 - DNA, 22 bp, synthetic construct
  misc_feature 1..22: note = Artificial sequence related to HLA knockouts in cell therapy
  source 1..22: mol_type = other DNA
gtcggactggcgcttcctccgc

SEQ ID NO: 21352 - DNA, 22 bp, synthetic construct
  misc_feature 1..22: note = Artificial sequence related to HLA knockouts in cell therapy
  source 1..22: mol_type = other DNA
tcggactggcgcttcctccgcg

SEQ ID NO: 21353 - DNA, 22 bp, synthetic construct
  misc_feature 1..22: note = Artificial sequence related to HLA knockouts in cell therapy
  source 1..22: mol_type = other DNA
cggactggcgcttcctccgcgg

SEQ ID NO: 21354 - DNA, 22 bp, synthetic construct
  misc_feature 1..22: note = Artificial sequence related to HLA knockouts in cell therapy
  source 1..22: mol_type = other DNA
ggactggcgcttcctccgcggg

SEQ ID NO: 21355 - DNA, 22 bp, synthetic construct
  misc_feature 1..22: note = Artificial sequence related to HLA knockouts in cell therapy
  source 1..22: mol_type = other DNA
gactggcgcttcctccgcgggt

SEQ ID NO: 21356 - DNA, 22 bp, synthetic construct
  misc_feature 1..22: note = Artificial sequence related to HLA knockouts in cell therapy
  source 1..22: mol_type = other DNA
actggcgcttcctccgcgggta

SEQ ID NO: 21357 - DNA, 22 bp, synthetic construct
  misc_feature 1..22: note = Artificial sequence related to HLA knockouts in cell therapy
  source 1..22: mol_type = other DNA
ctggcgcttcctccgcgggtac

SEQ ID NO: 21358 - DNA, 22 bp, synthetic construct
  misc_feature 1..22: note = Artificial sequence related to HLA knockouts in cell therapy
  source 1..22: mol_type = other DNA
tggcgcttcctccgcgggtacc

SEQ ID NO: 21359 - DNA, 22 bp, synthetic construct
  misc_feature 1..22: note = Artificial sequence related to HLA knockouts in cell therapy
  source 1..22: mol_type = other DNA
ggcgcttcctccgcgggtacca

SEQ ID NO: 21360 - DNA, 22 bp, synthetic construct
  misc_feature 1..22: note = Artificial sequence related to HLA knockouts in cell therapy
  source 1..22: mol_type = other DNA
gcgcttcctccgcgggtaccac

SEQ ID NO: 21361 - DNA, 22 bp, synthetic construct
  misc_feature 1..22: note = Artificial sequence related to HLA knockouts in cell therapy
  source 1..22: mol_type = other DNA
cgcttcctccgcgggtaccacc

SEQ ID NO: 21362 - DNA, 22 bp, synthetic construct
  misc_feature 1..22: note = Artificial sequence related to HLA knockouts in cell therapy
  source 1..22: mol_type = other DNA
gcttcctccgcgggtaccacca

SEQ ID NO: 21363 - DNA, 22 bp, synthetic construct
  misc_feature 1..22: note = Artificial sequence related to HLA knockouts in cell therapy
  source 1..22: mol_type = other DNA
cttcctccgcgggtaccaccag

SEQ ID NO: 21364 - DNA, 22 bp, synthetic construct
  misc_feature 1..22: note = Artificial sequence related to HLA knockouts in cell therapy
  source 1..22: mol_type = other DNA
ttcctccgcgggtaccaccagt

SEQ ID NO: 21365 - DNA, 22 bp, synthetic construct
  misc_feature 1..22: note = Artificial sequence related to HLA knockouts in cell therapy
  source 1..22: mol_type = other DNA
tcctccgcgggtaccaccagta

SEQ ID NO: 21366 - DNA, 22 bp, synthetic construct
  misc_feature 1..22: note = Artificial sequence related to HLA knockouts in cell therapy
  source 1..22: mol_type = other DNA
cctccgcgggtaccaccagtac

SEQ ID NO: 21367 - DNA, 22 bp, synthetic construct
  misc_feature 1..22: note = Artificial sequence related to HLA knockouts in cell therapy
  source 1..22: mol_type = other DNA
ctccgcgggtaccaccagtacg

SEQ ID NO: 21368 - DNA, 22 bp, synthetic construct
  misc_feature 1..22: note = Artificial sequence related to HLA knockouts in cell therapy
  source 1..22: mol_type = other DNA
tccgcgggtaccaccagtacgc

SEQ ID NO: 21369 - DNA, 22 bp, synthetic construct
  misc_feature 1..22: note = Artificial sequence related to HLA knockouts in cell therapy
  source 1..22: mol_type = other DNA
ccgcgggtaccaccagtacgcc

SEQ ID NO: 21370 - DNA, 22 bp, synthetic construct
  misc_feature 1..22: note = Artificial sequence related to HLA knockouts in cell therapy
  source 1..22: mol_type = other DNA
cgcgggtaccaccagtacgcct

SEQ ID NO: 21371 - DNA, 22 bp, synthetic construct
  misc_feature 1..22: note = Artificial sequence related to HLA knockouts in cell therapy
  source 1..22: mol_type = other DNA
gcgggtaccaccagtacgccta

SEQ ID NO: 21372 - DNA, 22 bp, synthetic construct
  misc_feature 1..22: note = Artificial sequence related to HLA knockouts in cell therapy
  source 1..22: mol_type = other DNA
cgggtaccaccagtacgcctac

SEQ ID NO: 21373 - DNA, 22 bp, synthetic construct
  misc_feature 1..22: note = Artificial sequence related to HLA knockouts in cell therapy
  source 1..22: mol_type = other DNA
gggtaccaccagtacgcctacg

SEQ ID NO: 21374 - DNA, 22 bp, synthetic construct
  misc_feature 1..22: note = Artificial sequence related to HLA knockouts in cell therapy
  source 1..22: mol_type = other DNA
accaccagtacgcctacgacgg

SEQ ID NO: 21375 - DNA, 22 bp, synthetic construct
  misc_feature 1..22: note = Artificial sequence related to HLA knockouts in cell therapy
  source 1..22: mol_type = other DNA
ccaccagtacgcctacgacggc

SEQ ID NO: 21376 - DNA, 22 bp, synthetic construct
  misc_feature 1..22: note = Artificial sequence related to HLA knockouts in cell therapy
  source 1..22: mol_type = other DNA
caccagtacgcctacgacggca

SEQ ID NO: 21377 - DNA, 22 bp, synthetic construct
  misc_feature 1..22: note = Artificial sequence related to HLA knockouts in cell therapy
  source 1..22: mol_type = other DNA
ccagtacgcctacgacggcaag

SEQ ID NO: 21378 - DNA, 22 bp, synthetic construct
  misc_feature 1..22: note = Artificial sequence related to HLA knockouts in cell therapy
  source 1..22: mol_type = other DNA
cagtacgcctacgacggcaagg

SEQ ID NO: 21379 - DNA, 22 bp, synthetic construct
  misc_feature 1..22: note = Artificial sequence related to HLA knockouts in cell therapy
  source 1..22: mol_type = other DNA
tcgccctgaaagaggacctgcg

SEQ ID NO: 21380 - DNA, 22 bp, synthetic construct
  misc_feature 1..22: note = Artificial sequence related to HLA knockouts in cell therapy
  source 1..22: mol_type = other DNA
cgccctgaaagaggacctgcgc

SEQ ID NO: 21381 - DNA, 22 bp, synthetic construct
  misc_feature 1..22: note = Artificial sequence related to HLA knockouts in cell therapy
  source 1..22: mol_type = other DNA
gccctgaaagaggacctgcgct

SEQ ID NO: 21382 - DNA, 22 bp, synthetic construct
  misc_feature 1..22: note = Artificial sequence related to HLA knockouts in cell therapy
  source 1..22: mol_type = other DNA
ccctgaaagaggacctgcgctc

SEQ ID NO: 21383 - DNA, 22 bp, synthetic construct
  misc_feature 1..22: note = Artificial sequence related to HLA knockouts in cell therapy
  source 1..22: mol_type = other DNA
agaggacctgcgctcttggacc

SEQ ID NO: 21384 - DNA, 22 bp, synthetic construct
  misc_feature 1..22: note = Artificial sequence related to HLA knockouts in cell therapy
  source 1..22: mol_type = other DNA
gaggacctgcgctcttggaccg

SEQ ID NO: 21385 - DNA, 22 bp, synthetic construct
  misc_feature 1..22: note = Artificial sequence related to HLA knockouts in cell therapy
  source 1..22: mol_type = other DNA
aggacctgcgctcttggaccgc

SEQ ID NO: 21386 - DNA, 22 bp, synthetic construct
  misc_feature 1..22: note = Artificial sequence related to HLA knockouts in cell therapy
  source 1..22: mol_type = other DNA
ggacctgcgctcttggaccgcg

SEQ ID NO: 21387 - DNA, 22 bp, synthetic construct
  misc_feature 1..22: note = Artificial sequence related to HLA knockouts in cell therapy
  source 1..22: mol_type = other DNA
gacctgcgctcttggaccgcgg

SEQ ID NO: 21388 - DNA, 22 bp, synthetic construct
  misc_feature 1..22: note = Artificial sequence related to HLA knockouts in cell therapy
  source 1..22: mol_type = other DNA
acctgcgctcttggaccgcggc

SEQ ID NO: 21389 - DNA, 22 bp, synthetic construct
  misc_feature 1..22: note = Artificial sequence related to HLA knockouts in cell therapy
  source 1..22: mol_type = other DNA
cctgcgctcttggaccgcggcg

SEQ ID NO: 21390 - DNA, 22 bp, synthetic construct
  misc_feature 1..22: note = Artificial sequence related to HLA knockouts in cell therapy
  source 1..22: mol_type = other DNA
ctgcgctcttggaccgcggcgg

SEQ ID NO: 21391 - DNA, 22 bp, synthetic construct
  misc_feature 1..22: note = Artificial sequence related to HLA knockouts in cell therapy
  source 1..22: mol_type = other DNA
tgcgctcttggaccgcggcgga

SEQ ID NO: 21392 - DNA, 22 bp, synthetic construct
  misc_feature 1..22: note = Artificial sequence related to HLA knockouts in cell therapy
  source 1..22: mol_type = other DNA
gcgctcttggaccgcggcggac

SEQ ID NO: 21393 - DNA, 22 bp, synthetic construct
  misc_feature 1..22: note = Artificial sequence related to HLA knockouts in cell therapy
  source 1..22: mol_type = other DNA
cgctcttggaccgcggcggaca

SEQ ID NO: 21394 - DNA, 22 bp, synthetic construct
  misc_feature 1..22: note = Artificial sequence related to HLA knockouts in cell therapy
  source 1..22: mol_type = other DNA
gctcttggaccgcggcggacat

SEQ ID NO: 21395 - DNA, 22 bp, synthetic construct
  misc_feature 1..22: note = Artificial sequence related to HLA knockouts in cell therapy
  source 1..22: mol_type = other DNA
ctcttggaccgcggcggacatg

SEQ ID NO: 21396 - DNA, 22 bp, synthetic construct
  misc_feature 1..22: note = Artificial sequence related to HLA knockouts in cell therapy
  source 1..22: mol_type = other DNA
tcttggaccgcggcggacatgg

SEQ ID NO: 21397 - DNA, 22 bp, synthetic construct
  misc_feature 1..22: note = Artificial sequence related to HLA knockouts in cell therapy
  source 1..22: mol_type = other DNA
cttggaccgcggcggacatggc

SEQ ID NO: 21398 - DNA, 22 bp, synthetic construct
  misc_feature 1..22: note = Artificial sequence related to HLA knockouts in cell therapy
  source 1..22: mol_type = other DNA
ttggaccgcggcggacatggca

SEQ ID NO: 21399 - DNA, 22 bp, synthetic construct
  misc_feature 1..22: note = Artificial sequence related to HLA knockouts in cell therapy
  source 1..22: mol_type = other DNA
tggaccgcggcggacatggcag

SEQ ID NO: 21400 - DNA, 22 bp, synthetic construct
  misc_feature 1..22: note = Artificial sequence related to HLA knockouts in cell therapy
  source 1..22: mol_type = other DNA
ggaccgcggcggacatggcagc

SEQ ID NO: 21401 - DNA, 22 bp, synthetic construct
  misc_feature 1..22: note = Artificial sequence related to HLA knockouts in cell therapy
  source 1..22: mol_type = other DNA
gaccgcggcggacatggcagct

SEQ ID NO: 21402 - DNA, 22 bp, synthetic construct
  misc_feature 1..22: note = Artificial sequence related to HLA knockouts in cell therapy
  source 1..22: mol_type = other DNA
accgcggcggacatggcagctc

SEQ ID NO: 21403 - DNA, 22 bp, synthetic construct
  misc_feature 1..22: note = Artificial sequence related to HLA knockouts in cell therapy
  source 1..22: mol_type = other DNA
ccgcggcggacatggcagctca

SEQ ID NO: 21404 - DNA, 22 bp, synthetic construct
  misc_feature 1..22: note = Artificial sequence related to HLA knockouts in cell therapy
  source 1..22: mol_type = other DNA
cgcggcggacatggcagctcag

SEQ ID NO: 21405 - DNA, 22 bp, synthetic construct
  misc_feature 1..22: note = Artificial sequence related to HLA knockouts in cell therapy
  source 1..22: mol_type = other DNA
gcggcggacatggcagctcaga

SEQ ID NO: 21406 - DNA, 22 bp, synthetic construct
  misc_feature 1..22: note = Artificial sequence related to HLA knockouts in cell therapy
  source 1..22: mol_type = other DNA
cggcggacatggcagctcagac

SEQ ID NO: 21407 - DNA, 22 bp, synthetic construct
  misc_feature 1..22: note = Artificial sequence related to HLA knockouts in cell therapy
  source 1..22: mol_type = other DNA
ggcggacatggcagctcagacc

SEQ ID NO: 21408 - DNA, 22 bp, synthetic construct
  misc_feature 1..22: note = Artificial sequence related to HLA knockouts in cell therapy
  source 1..22: mol_type = other DNA
gcggacatggcagctcagacca

SEQ ID NO: 21409 - DNA, 22 bp, synthetic construct
  misc_feature 1..22: note = Artificial sequence related to HLA knockouts in cell therapy
  source 1..22: mol_type = other DNA
cggacatggcagctcagaccac

SEQ ID NO: 21410 - DNA, 22 bp, synthetic construct
  misc_feature 1..22: note = Artificial sequence related to HLA knockouts in cell therapy
  source 1..22: mol_type = other DNA
ggacatggcagctcagaccacc

SEQ ID NO: 21411 - DNA, 22 bp, synthetic construct
  misc_feature 1..22: note = Artificial sequence related to HLA knockouts in cell therapy
  source 1..22: mol_type = other DNA
ggcagctcagaccaccaagcac

SEQ ID NO: 21412 - DNA, 22 bp, synthetic construct
  misc_feature 1..22: note = Artificial sequence related to HLA knockouts in cell therapy
  source 1..22: mol_type = other DNA
ccaccaagcacaagtgggaggc

SEQ ID NO: 21413 - DNA, 22 bp, synthetic construct
  misc_feature 1..22: note = Artificial sequence related to HLA knockouts in cell therapy
  source 1..22: mol_type = other DNA
caccaagcacaagtgggaggcg

SEQ ID NO: 21414 - DNA, 22 bp, synthetic construct
  misc_feature 1..22: note = Artificial sequence related to HLA knockouts in cell therapy
  source 1..22: mol_type = other DNA
accaagcacaagtgggaggcgg

SEQ ID NO: 21415 - DNA, 22 bp, synthetic construct
  misc_feature 1..22: note = Artificial sequence related to HLA knockouts in cell therapy
  source 1..22: mol_type = other DNA
ccaagcacaagtgggaggcggc

SEQ ID NO: 21416 - DNA, 22 bp, synthetic construct
  misc_feature 1..22: note = Artificial sequence related to HLA knockouts in cell therapy
  source 1..22: mol_type = other DNA
caagcacaagtgggaggcggcc

SEQ ID NO: 21417 - DNA, 22 bp, synthetic construct
  misc_feature 1..22: note = Artificial sequence related to HLA knockouts in cell therapy
  source 1..22: mol_type = other DNA
aagcacaagtgggaggcggccc

SEQ ID NO: 21418 - DNA, 22 bp, synthetic construct
  misc_feature 1..22: note = Artificial sequence related to HLA knockouts in cell therapy
  source 1..22: mol_type = other DNA
agcacaagtgggaggcggccca

SEQ ID NO: 21419 - DNA, 22 bp, synthetic construct
  misc_feature 1..22: note = Artificial sequence related to HLA knockouts in cell therapy
  source 1..22: mol_type = other DNA
gcacaagtgggaggcggcccat

SEQ ID NO: 21420 - DNA, 22 bp, synthetic construct
  misc_feature 1..22: note = Artificial sequence related to HLA knockouts in cell therapy
  source 1..22: mol_type = other DNA
cacaagtgggaggcggcccatg

SEQ ID NO: 21421 - DNA, 22 bp, synthetic construct
  misc_feature 1..22: note = Artificial sequence related to HLA knockouts in cell therapy
  source 1..22: mol_type = other DNA
acaagtgggaggcggcccatgt

SEQ ID NO: 21422 - DNA, 22 bp, synthetic construct
  misc_feature 1..22: note = Artificial sequence related to HLA knockouts in cell therapy
  source 1..22: mol_type = other DNA
caagtgggaggcggcccatgtg

SEQ ID NO: 21423 - DNA, 22 bp, synthetic construct
  misc_feature 1..22: note = Artificial sequence related to HLA knockouts in cell therapy
  source 1..22: mol_type = other DNA
aagtgggaggcggcccatgtgg

SEQ ID NO: 21424 - DNA, 22 bp, synthetic construct
  misc_feature 1..22: note = Artificial sequence related to HLA knockouts in cell therapy
  source 1..22: mol_type = other DNA
agtgggaggcggcccatgtggc

SEQ ID NO: 21425 - DNA, 22 bp, synthetic construct
  misc_feature 1..22: note = Artificial sequence related to HLA knockouts in cell therapy
  source 1..22: mol_type = other DNA
gtgggaggcggcccatgtggcg

SEQ ID NO: 21426 - DNA, 22 bp, synthetic construct
  misc_feature 1..22: note = Artificial sequence related to HLA knockouts in cell therapy
  source 1..22: mol_type = other DNA
tgggaggcggcccatgtggcgg

SEQ ID NO: 21427 - DNA, 22 bp, synthetic construct
  misc_feature 1..22: note = Artificial sequence related to HLA knockouts in cell therapy
  source 1..22: mol_type = other DNA
gggaggcggcccatgtggcgga

SEQ ID NO: 21428 - DNA, 22 bp, synthetic construct
  misc_feature 1..22: note = Artificial sequence related to HLA knockouts in cell therapy
  source 1..22: mol_type = other DNA
ggaggcggcccatgtggcggag

SEQ ID NO: 21429 - DNA, 22 bp, synthetic construct
  misc_feature 1..22: note = Artificial sequence related to HLA knockouts in cell therapy
  source 1..22: mol_type = other DNA
gaggcggcccatgtggcggagc

SEQ ID NO: 21430 - DNA, 22 bp, synthetic construct
  misc_feature 1..22: note = Artificial sequence related to HLA knockouts in cell therapy
  source 1..22: mol_type = other DNA
aggcggcccatgtggcggagca

SEQ ID NO: 21431 - DNA, 22 bp, synthetic construct
  misc_feature 1..22: note = Artificial sequence related to HLA knockouts in cell therapy
  source 1..22: mol_type = other DNA
ggcggcccatgtggcggagcag

SEQ ID NO: 21432 - DNA, 22 bp, synthetic construct
  misc_feature 1..22: note = Artificial sequence related to HLA knockouts in cell therapy
  source 1..22: mol_type = other DNA
gcggcccatgtggcggagcagt

SEQ ID NO: 21433 - DNA, 22 bp, synthetic construct
  misc_feature 1..22: note = Artificial sequence related to HLA knockouts in cell therapy
  source 1..22: mol_type = other DNA
cggcccatgtggcggagcagtt

SEQ ID NO: 21434 - DNA, 22 bp, synthetic construct
  misc_feature 1..22: note = Artificial sequence related to HLA knockouts in cell therapy
  source 1..22: mol_type = other DNA
ggcccatgtggcggagcagttg

SEQ ID NO: 21435 - DNA, 22 bp, synthetic construct
  misc_feature 1..22: note = Artificial sequence related to HLA knockouts in cell therapy
  source 1..22: mol_type = other DNA
gcccatgtggcggagcagttga

SEQ ID NO: 21436 - DNA, 22 bp, synthetic construct
  misc_feature 1..22: note = Artificial sequence related to HLA knockouts in cell therapy
  source 1..22: mol_type = other DNA
cccatgtggcggagcagttgag

SEQ ID NO: 21437 - DNA, 22 bp, synthetic construct
  misc_feature 1..22: note = Artificial sequence related to HLA knockouts in cell therapy
  source 1..22: mol_type = other DNA
tgtggcggagcagttgagagcc

SEQ ID NO: 21438 - DNA, 22 bp, synthetic construct
  misc_feature 1..22: note = Artificial sequence related to HLA knockouts in cell therapy
  source 1..22: mol_type = other DNA
gtggcggagcagttgagagcct

SEQ ID NO: 21439 - DNA, 22 bp, synthetic construct
  misc_feature 1..22: note = Artificial sequence related to HLA knockouts in cell therapy
  source 1..22: mol_type = other DNA
ggcggagcagttgagagcctac

SEQ ID NO: 21440 - DNA, 22 bp, synthetic construct
  misc_feature 1..22: note = Artificial sequence related to HLA knockouts in cell therapy
  source 1..22: mol_type = other DNA
gcggagcagttgagagcctacc

SEQ ID NO: 21441 - DNA, 22 bp, synthetic construct
  misc_feature 1..22: note = Artificial sequence related to HLA knockouts in cell therapy
  source 1..22: mol_type = other DNA
gttgagagcctacctggagggc

SEQ ID NO: 21442 - DNA, 22 bp, synthetic construct
  misc_feature 1..22: note = Artificial sequence related to HLA knockouts in cell therapy
  source 1..22: mol_type = other DNA
tgagagcctacctggagggcac

SEQ ID NO: 21443 - DNA, 22 bp, synthetic construct
  misc_feature 1..22: note = Artificial sequence related to HLA knockouts in cell therapy
  source 1..22: mol_type = other DNA
gagagcctacctggagggcacg

SEQ ID NO: 21444 - DNA, 22 bp, synthetic construct
  misc_feature 1..22: note = Artificial sequence related to HLA knockouts in cell therapy
  source 1..22: mol_type = other DNA
agagcctacctggagggcacgt

SEQ ID NO: 21445 - DNA, 22 bp, synthetic construct
  misc_feature 1..22: note = Artificial sequence related to HLA knockouts in cell therapy
  source 1..22: mol_type = other DNA
gagcctacctggagggcacgtg

SEQ ID NO: 21446 - DNA, 22 bp, synthetic construct
  misc_feature 1..22: note = Artificial sequence related to HLA knockouts in cell therapy
  source 1..22: mol_type = other DNA
agcctacctggagggcacgtgc

SEQ ID NO: 21447 - DNA, 22 bp, synthetic construct
  misc_feature 1..22: note = Artificial sequence related to HLA knockouts in cell therapy
  source 1..22: mol_type = other DNA
gcctacctggagggcacgtgcg

SEQ ID NO: 21448 - DNA, 22 bp, synthetic construct
  misc_feature 1..22: note = Artificial sequence related to HLA knockouts in cell therapy
  source 1..22: mol_type = other DNA
cctacctggagggcacgtgcgt

SEQ ID NO: 21449 - DNA, 22 bp, synthetic construct
  misc_feature 1..22: note = Artificial sequence related to HLA knockouts in cell therapy
  source 1..22: mol_type = other DNA
ctacctggagggcacgtgcgtg

SEQ ID NO: 21450 - DNA, 22 bp, synthetic construct
  misc_feature 1..22: note = Artificial sequence related to HLA knockouts in cell therapy
  source 1..22: mol_type = other DNA
tacctggagggcacgtgcgtgg

SEQ ID NO: 21451 - DNA, 22 bp, synthetic construct
  misc_feature 1..22: note = Artificial sequence related to HLA knockouts in cell therapy
  source 1..22: mol_type = other DNA
acctggagggcacgtgcgtgga

SEQ ID NO: 21452 - DNA, 22 bp, synthetic construct
  misc_feature 1..22: note = Artificial sequence related to HLA knockouts in cell therapy
  source 1..22: mol_type = other DNA
cctggagggcacgtgcgtggag

SEQ ID NO: 21453 - DNA, 22 bp, synthetic construct
  misc_feature 1..22: note = Artificial sequence related to HLA knockouts in cell therapy
  source 1..22: mol_type = other DNA
ctggagggcacgtgcgtggagt

SEQ ID NO: 21454 - DNA, 22 bp, synthetic construct
  misc_feature 1..22: note = Artificial sequence related to HLA knockouts in cell therapy
  source 1..22: mol_type = other DNA
tggagggcacgtgcgtggagtg

SEQ ID NO: 21455 - DNA, 22 bp, synthetic construct
  misc_feature 1..22: note = Artificial sequence related to HLA knockouts in cell therapy
  source 1..22: mol_type = other DNA
ggagggcacgtgcgtggagtgg

SEQ ID NO: 21456 - DNA, 22 bp, synthetic construct
  misc_feature 1..22: note = Artificial sequence related to HLA knockouts in cell therapy
  source 1..22: mol_type = other DNA
gagggcacgtgcgtggagtggc

SEQ ID NO: 21457 - DNA, 22 bp, synthetic construct
  misc_feature 1..22: note = Artificial sequence related to HLA knockouts in cell therapy
  source 1..22: mol_type = other DNA
agggcacgtgcgtggagtggct

SEQ ID NO: 21458 - DNA, 22 bp, synthetic construct
  misc_feature 1..22: note = Artificial sequence related to HLA knockouts in cell therapy
  source 1..22: mol_type = other DNA
gggcacgtgcgtggagtggctc

SEQ ID NO: 21459 - DNA, 22 bp, synthetic construct
  misc_feature 1..22: note = Artificial sequence related to HLA knockouts in cell therapy
  source 1..22: mol_type = other DNA
ggcacgtgcgtggagtggctcc

SEQ ID NO: 21460 - DNA, 22 bp, synthetic construct
  misc_feature 1..22: note = Artificial sequence related to HLA knockouts in cell therapy
  source 1..22: mol_type = other DNA
gcacgtgcgtggagtggctccg

SEQ ID NO: 21461 - DNA, 22 bp, synthetic construct
  misc_feature 1..22: note = Artificial sequence related to HLA knockouts in cell therapy
  source 1..22: mol_type = other DNA
cacgtgcgtggagtggctccgc

SEQ ID NO: 21462 - DNA, 22 bp, synthetic construct
  misc_feature 1..22: note = Artificial sequence related to HLA knockouts in cell therapy
  source 1..22: mol_type = other DNA
acgtgcgtggagtggctccgca

SEQ ID NO: 21463 - DNA, 22 bp, synthetic construct
  misc_feature 1..22: note = Artificial sequence related to HLA knockouts in cell therapy
  source 1..22: mol_type = other DNA
cgtgcgtggagtggctccgcag

SEQ ID NO: 21464 - DNA, 22 bp, synthetic construct
  misc_feature 1..22: note = Artificial sequence related to HLA knockouts in cell therapy
  source 1..22: mol_type = other DNA
gtgcgtggagtggctccgcaga

SEQ ID NO: 21465 - DNA, 22 bp, synthetic construct
  misc_feature 1..22: note = Artificial sequence related to HLA knockouts in cell therapy
  source 1..22: mol_type = other DNA
tgcgtggagtggctccgcagat

SEQ ID NO: 21466 - DNA, 22 bp, synthetic construct
  misc_feature 1..22: note = Artificial sequence related to HLA knockouts in cell therapy
  source 1..22: mol_type = other DNA
gcgtggagtggctccgcagata

SEQ ID NO: 21467 - DNA, 22 bp, synthetic construct
  misc_feature 1..22: note = Artificial sequence related to HLA knockouts in cell therapy
  source 1..22: mol_type = other DNA
cgtggagtggctccgcagatac

SEQ ID NO: 21468 - DNA, 22 bp, synthetic construct
  misc_feature 1..22: note = Artificial sequence related to HLA knockouts in cell therapy
  source 1..22: mol_type = other DNA
gtggagtggctccgcagatacc

SEQ ID NO: 21469 - DNA, 22 bp, synthetic construct
  misc_feature 1..22: note = Artificial sequence related to HLA knockouts in cell therapy
  source 1..22: mol_type = other DNA
ggagtggctccgcagatacctg

SEQ ID NO: 21470 - DNA, 22 bp, synthetic construct
  misc_feature 1..22: note = Artificial sequence related to HLA knockouts in cell therapy
  source 1..22: mol_type = other DNA
gagtggctccgcagatacctgg

SEQ ID NO: 21471 - DNA, 22 bp, synthetic construct
  misc_feature 1..22: note = Artificial sequence related to HLA knockouts in cell therapy
  source 1..22: mol_type = other DNA
gtggctccgcagatacctggag

SEQ ID NO: 21472 - DNA, 22 bp, synthetic construct
  misc_feature 1..22: note = Artificial sequence related to HLA knockouts in cell therapy
  source 1..22: mol_type = other DNA
ccgcagatacctggagaacggg

SEQ ID NO: 21473 - DNA, 22 bp, synthetic construct
  misc_feature 1..22: note = Artificial sequence related to HLA knockouts in cell therapy
  source 1..22: mol_type = other DNA
cctggagaacgggaaggagacg

SEQ ID NO: 21474 - DNA, 22 bp, synthetic construct
  misc_feature 1..22: note = Artificial sequence related to HLA knockouts in cell therapy
  source 1..22: mol_type = other DNA
ctggagaacgggaaggagacgc

SEQ ID NO: 21475 - DNA, 22 bp, synthetic construct
  misc_feature 1..22: note = Artificial sequence related to HLA knockouts in cell therapy
  source 1..22: mol_type = other DNA
ggagaacgggaaggagacgctg

SEQ ID NO: 21476 - DNA, 22 bp, synthetic construct
  misc_feature 1..22: note = Artificial sequence related to HLA knockouts in cell therapy
  source 1..22: mol_type = other DNA
gagaacgggaaggagacgctgc

SEQ ID NO: 21477 - DNA, 22 bp, synthetic construct
  misc_feature 1..22: note = Artificial sequence related to HLA knockouts in cell therapy
  source 1..22: mol_type = other DNA
gaacgggaaggagacgctgcag

SEQ ID NO: 21478 - DNA, 22 bp, synthetic construct
  misc_feature 1..22: note = Artificial sequence related to HLA knockouts in cell therapy
  source 1..22: mol_type = other DNA
aacgggaaggagacgctgcagc

SEQ ID NO: 21479 - DNA, 22 bp, synthetic construct
  misc_feature 1..22: note = Artificial sequence related to HLA knockouts in cell therapy
  source 1..22: mol_type = other DNA
acgggaaggagacgctgcagcg

SEQ ID NO: 21480 - DNA, 22 bp, synthetic construct
  misc_feature 1..22: note = Artificial sequence related to HLA knockouts in cell therapy
  source 1..22: mol_type = other DNA
cgggaaggagacgctgcagcgc

SEQ ID NO: 21481 - DNA, 22 bp, synthetic construct
  misc_feature 1..22: note = Artificial sequence related to HLA knockouts in cell therapy
  source 1..22: mol_type = other DNA
gggaaggagacgctgcagcgca

SEQ ID NO: 21482 - DNA, 22 bp, synthetic construct
  misc_feature 1..22: note = Artificial sequence related to HLA knockouts in cell therapy
  source 1..22: mol_type = other DNA
ggaaggagacgctgcagcgcac

SEQ ID NO: 21483 - DNA, 22 bp, synthetic construct
  misc_feature 1..22: note = Artificial sequence related to HLA knockouts in cell therapy
  source 1..22: mol_type = other DNA
gaaggagacgctgcagcgcacg

SEQ ID NO: 21484 - DNA, 22 bp, synthetic construct
  misc_feature 1..22: note = Artificial sequence related to HLA knockouts in cell therapy
  source 1..22: mol_type = other DNA
aaggagacgctgcagcgcacgg

SEQ ID NO: 21485 - DNA, 22 bp, synthetic construct
  misc_feature 1..22: note = Artificial sequence related to HLA knockouts in cell therapy
  source 1..22: mol_type = other DNA
aggagacgctgcagcgcacgga

SEQ ID NO: 21486 - DNA, 22 bp, synthetic construct
  misc_feature 1..22: note = Artificial sequence related to HLA knockouts in cell therapy
  source 1..22: mol_type = other DNA
ggagacgctgcagcgcacggac

SEQ ID NO: 21487 - DNA, 22 bp, synthetic construct
  misc_feature 1..22: note = Artificial sequence related to HLA knockouts in cell therapy
  source 1..22: mol_type = other DNA
gagacgctgcagcgcacggacg

SEQ ID NO: 21488 - DNA, 22 bp, synthetic construct
  misc_feature 1..22: note = Artificial sequence related to HLA knockouts in cell therapy
  source 1..22: mol_type = other DNA
agacgctgcagcgcacggacgc

SEQ ID NO: 21489 - DNA, 22 bp, synthetic construct
  misc_feature 1..22: note = Artificial sequence related to HLA knockouts in cell therapy
  source 1..22: mol_type = other DNA
gacgctgcagcgcacggacgcc

SEQ ID NO: 21490 - DNA, 22 bp, synthetic construct
  misc_feature 1..22: note = Artificial sequence related to HLA knockouts in cell therapy
  source 1..22: mol_type = other DNA
acgctgcagcgcacggacgccc

SEQ ID NO: 21491 - DNA, 22 bp, synthetic construct
  misc_feature 1..22: note = Artificial sequence related to HLA knockouts in cell therapy
  source 1..22: mol_type = other DNA
cgctgcagcgcacggacgcccc

SEQ ID NO: 21492 - DNA, 22 bp, synthetic construct
  misc_feature 1..22: note = Artificial sequence related to HLA knockouts in cell therapy
  source 1..22: mol_type = other DNA
gctgcagcgcacggacgccccc

SEQ ID NO: 21493 - DNA, 22 bp, synthetic construct
  misc_feature 1..22: note = Artificial sequence related to HLA knockouts in cell therapy
  source 1..22: mol_type = other DNA
ctgcagcgcacggacgccccca

SEQ ID NO: 21494 - DNA, 22 bp, synthetic construct
  misc_feature 1..22: note = Artificial sequence related to HLA knockouts in cell therapy
  source 1..22: mol_type = other DNA
tgcagcgcacggacgcccccaa

SEQ ID NO: 21495 - DNA, 22 bp, synthetic construct
  misc_feature 1..22: note = Artificial sequence related to HLA knockouts in cell therapy
  source 1..22: mol_type = other DNA
gcagcgcacggacgcccccaaa

SEQ ID NO: 21496 - DNA, 22 bp, synthetic construct
  misc_feature 1..22: note = Artificial sequence related to HLA knockouts in cell therapy
  source 1..22: mol_type = other DNA
cagcgcacggacgcccccaaaa

SEQ ID NO: 21497 - DNA, 22 bp, synthetic construct
  misc_feature 1..22: note = Artificial sequence related to HLA knockouts in cell therapy
  source 1..22: mol_type = other DNA
agcgcacggacgcccccaaaac

SEQ ID NO: 21498 - DNA, 22 bp, synthetic construct
  misc_feature 1..22: note = Artificial sequence related to HLA knockouts in cell therapy
  source 1..22: mol_type = other DNA
gcgcacggacgcccccaaaacg

SEQ ID NO: 21499 - DNA, 22 bp, synthetic construct
  misc_feature 1..22: note = Artificial sequence related to HLA knockouts in cell therapy
  source 1..22: mol_type = other DNA
cgcacggacgcccccaaaacgc

SEQ ID NO: 21500 - DNA, 22 bp, synthetic construct
  misc_feature 1..22: note = Artificial sequence related to HLA knockouts in cell therapy
  source 1..22: mol_type = other DNA
gcacggacgcccccaaaacgca

SEQ ID NO: 21501 - DNA, 22 bp, synthetic construct
  misc_feature 1..22: note = Artificial sequence related to HLA knockouts in cell therapy
  source 1..22: mol_type = other DNA
cacggacgcccccaaaacgcat

SEQ ID NO: 21502 - DNA, 22 bp, synthetic construct
  misc_feature 1..22: note = Artificial sequence related to HLA knockouts in cell therapy
  source 1..22: mol_type = other DNA
ccatgaagccaccctgaggtgc

SEQ ID NO: 21503 - DNA, 22 bp, synthetic construct
  misc_feature 1..22: note = Artificial sequence related to HLA knockouts in cell therapy
  source 1..22: mol_type = other DNA
tgaagccaccctgaggtgctgg

SEQ ID NO: 21504 - DNA, 22 bp, synthetic construct
  misc_feature 1..22: note = Artificial sequence related to HLA knockouts in cell therapy
  source 1..22: mol_type = other DNA
gaagccaccctgaggtgctggg

SEQ ID NO: 21505 - DNA, 22 bp, synthetic construct
  misc_feature 1..22: note = Artificial sequence related to HLA knockouts in cell therapy
  source 1..22: mol_type = other DNA
aagccaccctgaggtgctgggc

SEQ ID NO: 21506 - DNA, 22 bp, synthetic construct
  misc_feature 1..22: note = Artificial sequence related to HLA knockouts in cell therapy
  source 1..22: mol_type = other DNA
agccaccctgaggtgctgggcc

SEQ ID NO: 21507 - DNA, 22 bp, synthetic construct
  misc_feature 1..22: note = Artificial sequence related to HLA knockouts in cell therapy
  source 1..22: mol_type = other DNA
gccaccctgaggtgctgggccc

SEQ ID NO: 21508 - DNA, 22 bp, synthetic construct
  misc_feature 1..22: note = Artificial sequence related to HLA knockouts in cell therapy
  source 1..22: mol_type = other DNA
ccaccctgaggtgctgggccct

SEQ ID NO: 21509 - DNA, 22 bp, synthetic construct
  misc_feature 1..22: note = Artificial sequence related to HLA knockouts in cell therapy
  source 1..22: mol_type = other DNA
caccctgaggtgctgggccctg

SEQ ID NO: 21510 - DNA, 22 bp, synthetic construct
  misc_feature 1..22: note = Artificial sequence related to HLA knockouts in cell therapy
  source 1..22: mol_type = other DNA
accctgaggtgctgggccctga

SEQ ID NO: 21511 - DNA, 22 bp, synthetic construct
  misc_feature 1..22: note = Artificial sequence related to HLA knockouts in cell therapy
  source 1..22: mol_type = other DNA
ccctgaggtgctgggccctgag

SEQ ID NO: 21512 - DNA, 22 bp, synthetic construct
  misc_feature 1..22: note = Artificial sequence related to HLA knockouts in cell therapy
  source 1..22: mol_type = other DNA
cctgaggtgctgggccctgagc

SEQ ID NO: 21513 - DNA, 22 bp, synthetic construct
  misc_feature 1..22: note = Artificial sequence related to HLA knockouts in cell therapy
  source 1..22: mol_type = other DNA
ctgaggtgctgggccctgagct

SEQ ID NO: 21514 - DNA, 22 bp, synthetic construct
  misc_feature 1..22: note = Artificial sequence related to HLA knockouts in cell therapy
  source 1..22: mol_type = other DNA
tgaggtgctgggccctgagctt

SEQ ID NO: 21515 - DNA, 22 bp, synthetic construct
  misc_feature 1..22: note = Artificial sequence related to HLA knockouts in cell therapy
  source 1..22: mol_type = other DNA
gaggtgctgggccctgagcttc

SEQ ID NO: 21516 - DNA, 22 bp, synthetic construct
  misc_feature 1..22: note = Artificial sequence related to HLA knockouts in cell therapy
  source 1..22: mol_type = other DNA
aggtgctgggccctgagcttct

SEQ ID NO: 21517 - DNA, 22 bp, synthetic construct
  misc_feature 1..22: note = Artificial sequence related to HLA knockouts in cell therapy
  source 1..22: mol_type = other DNA
ggtgctgggccctgagcttcta

SEQ ID NO: 21518 - DNA, 22 bp, synthetic construct
  misc_feature 1..22: note = Artificial sequence related to HLA knockouts in cell therapy
  source 1..22: mol_type = other DNA
gtgctgggccctgagcttctac

SEQ ID NO: 21519 - DNA, 22 bp, synthetic construct
  misc_feature 1..22: note = Artificial sequence related to HLA knockouts in cell therapy
  source 1..22: mol_type = other DNA
tgctgggccctgagcttctacc

SEQ ID NO: 21520 - DNA, 22 bp, synthetic construct
  misc_feature 1..22: note = Artificial sequence related to HLA knockouts in cell therapy
  source 1..22: mol_type = other DNA
gctgggccctgagcttctaccc

SEQ ID NO: 21521 - DNA, 22 bp, synthetic construct
  misc_feature 1..22: note = Artificial sequence related to HLA knockouts in cell therapy
  source 1..22: mol_type = other DNA
ctgggccctgagcttctaccct

SEQ ID NO: 21522 - DNA, 22 bp, synthetic construct
  misc_feature 1..22: note = Artificial sequence related to HLA knockouts in cell therapy
  source 1..22: mol_type = other DNA
tgggccctgagcttctaccctg

SEQ ID NO: 21523 - DNA, 22 bp, synthetic construct
  misc_feature 1..22: note = Artificial sequence related to HLA knockouts in cell therapy
  source 1..22: mol_type = other DNA
gggccctgagcttctaccctgc

SEQ ID NO: 21524 - DNA, 22 bp, synthetic construct
  misc_feature 1..22: note = Artificial sequence related to HLA knockouts in cell therapy
  source 1..22: mol_type = other DNA
ggccctgagcttctaccctgcg

SEQ ID NO: 21525 - DNA, 22 bp, synthetic construct
  misc_feature 1..22: note = Artificial sequence related to HLA knockouts in cell therapy
  source 1..22: mol_type = other DNA
gccctgagcttctaccctgcgg

SEQ ID NO: 21526 - DNA, 22 bp, synthetic construct
  misc_feature 1..22: note = Artificial sequence related to HLA knockouts in cell therapy
  source 1..22: mol_type = other DNA
ccctgagcttctaccctgcgga

SEQ ID NO: 21527 - DNA, 22 bp, synthetic construct
  misc_feature 1..22: note = Artificial sequence related to HLA knockouts in cell therapy
  source 1..22: mol_type = other DNA
cctgagcttctaccctgcggag

SEQ ID NO: 21528 - DNA, 22 bp, synthetic construct
  misc_feature 1..22: note = Artificial sequence related to HLA knockouts in cell therapy
  source 1..22: mol_type = other DNA
ccctgcggagatcacactgacc

SEQ ID NO: 21529 - DNA, 22 bp, synthetic construct
  misc_feature 1..22: note = Artificial sequence related to HLA knockouts in cell therapy
  source 1..22: mol_type = other DNA
gcggagatcacactgacctggc

SEQ ID NO: 21530 - DNA, 22 bp, synthetic construct
  misc_feature 1..22: note = Artificial sequence related to HLA knockouts in cell therapy
  source 1..22: mol_type = other DNA
gatcacactgacctggcagcgg

SEQ ID NO: 21531 - DNA, 22 bp, synthetic construct
  misc_feature 1..22: note = Artificial sequence related to HLA knockouts in cell therapy
  source 1..22: mol_type = other DNA
atcacactgacctggcagcggg

SEQ ID NO: 21532 - DNA, 22 bp, synthetic construct
  misc_feature 1..22: note = Artificial sequence related to HLA knockouts in cell therapy
  source 1..22: mol_type = other DNA
tcacactgacctggcagcggga

SEQ ID NO: 21533 - DNA, 22 bp, synthetic construct
  misc_feature 1..22: note = Artificial sequence related to HLA knockouts in cell therapy
  source 1..22: mol_type = other DNA
cacactgacctggcagcgggat

SEQ ID NO: 21534 - DNA, 22 bp, synthetic construct
  misc_feature 1..22: note = Artificial sequence related to HLA knockouts in cell therapy
  source 1..22: mol_type = other DNA
acactgacctggcagcgggatg

SEQ ID NO: 21535 - DNA, 22 bp, synthetic construct
  misc_feature 1..22: note = Artificial sequence related to HLA knockouts in cell therapy
  source 1..22: mol_type = other DNA
cactgacctggcagcgggatgg

SEQ ID NO: 21536 - DNA, 22 bp, synthetic construct
  misc_feature 1..22: note = Artificial sequence related to HLA knockouts in cell therapy
  source 1..22: mol_type = other DNA
actgacctggcagcgggatggg

SEQ ID NO: 21537 - DNA, 22 bp, synthetic construct
  misc_feature 1..22: note = Artificial sequence related to HLA knockouts in cell therapy
  source 1..22: mol_type = other DNA
ctgacctggcagcgggatgggg

SEQ ID NO: 21538 - DNA, 22 bp, synthetic construct
  misc_feature 1..22: note = Artificial sequence related to HLA knockouts in cell therapy
  source 1..22: mol_type = other DNA
tgacctggcagcgggatgggga

SEQ ID NO: 21539 - DNA, 22 bp, synthetic construct
  misc_feature 1..22: note = Artificial sequence related to HLA knockouts in cell therapy
  source 1..22: mol_type = other DNA
gacctggcagcgggatggggag

SEQ ID NO: 21540 - DNA, 22 bp, synthetic construct
  misc_feature 1..22: note = Artificial sequence related to HLA knockouts in cell therapy
  source 1..22: mol_type = other DNA
acctggcagcgggatggggagg

SEQ ID NO: 21541 - DNA, 22 bp, synthetic construct
  misc_feature 1..22: note = Artificial sequence related to HLA knockouts in cell therapy
  source 1..22: mol_type = other DNA
cctggcagcgggatggggagga

SEQ ID NO: 21542 - DNA, 22 bp, synthetic construct
  misc_feature 1..22: note = Artificial sequence related to HLA knockouts in cell therapy
  source 1..22: mol_type = other DNA
ctggcagcgggatggggaggac

SEQ ID NO: 21543 - DNA, 22 bp, synthetic construct
  misc_feature 1..22: note = Artificial sequence related to HLA knockouts in cell therapy
  source 1..22: mol_type = other DNA
tggcagcgggatggggaggacc

SEQ ID NO: 21544 - DNA, 22 bp, synthetic construct
  misc_feature 1..22: note = Artificial sequence related to HLA knockouts in cell therapy
  source 1..22: mol_type = other DNA
ggcagcgggatggggaggacca

SEQ ID NO: 21545 - DNA, 22 bp, synthetic construct
  misc_feature 1..22: note = Artificial sequence related to HLA knockouts in cell therapy
  source 1..22: mol_type = other DNA
gcagcgggatggggaggaccag

SEQ ID NO: 21546 - DNA, 22 bp, synthetic construct
  misc_feature 1..22: note = Artificial sequence related to HLA knockouts in cell therapy
  source 1..22: mol_type = other DNA
cagcgggatggggaggaccaga

SEQ ID NO: 21547 - DNA, 22 bp, synthetic construct
  misc_feature 1..22: note = Artificial sequence related to HLA knockouts in cell therapy
  source 1..22: mol_type = other DNA
agcgggatggggaggaccagac

SEQ ID NO: 21548 - DNA, 22 bp, synthetic construct
  misc_feature 1..22: note = Artificial sequence related to HLA knockouts in cell therapy
  source 1..22: mol_type = other DNA
gcgggatggggaggaccagacc

SEQ ID NO: 21549 - DNA, 22 bp, synthetic construct
  misc_feature 1..22: note = Artificial sequence related to HLA knockouts in cell therapy
  source 1..22: mol_type = other DNA
cgggatggggaggaccagaccc

SEQ ID NO: 21550 - DNA, 22 bp, synthetic construct
  misc_feature 1..22: note = Artificial sequence related to HLA knockouts in cell therapy
  source 1..22: mol_type = other DNA
gggatggggaggaccagaccca

SEQ ID NO: 21551 - DNA, 22 bp, synthetic construct
  misc_feature 1..22: note = Artificial sequence related to HLA knockouts in cell therapy
  source 1..22: mol_type = other DNA
ggatggggaggaccagacccag

SEQ ID NO: 21552 - DNA, 22 bp, synthetic construct
  misc_feature 1..22: note = Artificial sequence related to HLA knockouts in cell therapy
  source 1..22: mol_type = other DNA
gatggggaggaccagacccagg

SEQ ID NO: 21553 - DNA, 22 bp, synthetic construct
  misc_feature 1..22: note = Artificial sequence related to HLA knockouts in cell therapy
  source 1..22: mol_type = other DNA
atggggaggaccagacccagga

SEQ ID NO: 21554 - DNA, 22 bp, synthetic construct
  misc_feature 1..22: note = Artificial sequence related to HLA knockouts in cell therapy
  source 1..22: mol_type = other DNA
tggggaggaccagacccaggac

SEQ ID NO: 21555 - DNA, 22 bp, synthetic construct
  misc_feature 1..22: note = Artificial sequence related to HLA knockouts in cell therapy
  source 1..22: mol_type = other DNA
ggggaggaccagacccaggaca

SEQ ID NO: 21556 - DNA, 22 bp, synthetic construct
  misc_feature 1..22: note = Artificial sequence related to HLA knockouts in cell therapy
  source 1..22: mol_type = other DNA
gggaggaccagacccaggacac

SEQ ID NO: 21557 - DNA, 22 bp, synthetic construct
  misc_feature 1..22: note = Artificial sequence related to HLA knockouts in cell therapy
  source 1..22: mol_type = other DNA
ggaggaccagacccaggacacg

SEQ ID NO: 21558 - DNA, 22 bp, synthetic construct
  misc_feature 1..22: note = Artificial sequence related to HLA knockouts in cell therapy
  source 1..22: mol_type = other DNA
gaggaccagacccaggacacgg

SEQ ID NO: 21559 - DNA, 22 bp, synthetic construct
  misc_feature 1..22: note = Artificial sequence related to HLA knockouts in cell therapy
  source 1..22: mol_type = other DNA
aggaccagacccaggacacgga

SEQ ID NO: 21560 - DNA, 22 bp, synthetic construct
  misc_feature 1..22: note = Artificial sequence related to HLA knockouts in cell therapy
  source 1..22: mol_type = other DNA
ggaccagacccaggacacggag

SEQ ID NO: 21561 - DNA, 22 bp, synthetic construct
  misc_feature 1..22: note = Artificial sequence related to HLA knockouts in cell therapy
  source 1..22: mol_type = other DNA
gaccagacccaggacacggagc

SEQ ID NO: 21562 - DNA, 22 bp, synthetic construct
  misc_feature 1..22: note = Artificial sequence related to HLA knockouts in cell therapy
  source 1..22: mol_type = other DNA
accagacccaggacacggagct

SEQ ID NO: 21563 - DNA, 22 bp, synthetic construct
  misc_feature 1..22: note = Artificial sequence related to HLA knockouts in cell therapy
  source 1..22: mol_type = other DNA
ccagacccaggacacggagctc

SEQ ID NO: 21564 - DNA, 22 bp, synthetic construct
  misc_feature 1..22: note = Artificial sequence related to HLA knockouts in cell therapy
  source 1..22: mol_type = other DNA
cagacccaggacacggagctcg

SEQ ID NO: 21565 - DNA, 22 bp, synthetic construct
  misc_feature 1..22: note = Artificial sequence related to HLA knockouts in cell therapy
  source 1..22: mol_type = other DNA
agacccaggacacggagctcgt

SEQ ID NO: 21566 - DNA, 22 bp, synthetic construct
  misc_feature 1..22: note = Artificial sequence related to HLA knockouts in cell therapy
  source 1..22: mol_type = other DNA
gacccaggacacggagctcgtg

SEQ ID NO: 21567 - DNA, 22 bp, synthetic construct
  misc_feature 1..22: note = Artificial sequence related to HLA knockouts in cell therapy
  source 1..22: mol_type = other DNA
acccaggacacggagctcgtgg

SEQ ID NO: 21568 - DNA, 22 bp, synthetic construct
  misc_feature 1..22: note = Artificial sequence related to HLA knockouts in cell therapy
  source 1..22: mol_type = other DNA
cccaggacacggagctcgtgga

SEQ ID NO: 21569 - DNA, 22 bp, synthetic construct
  misc_feature 1..22: note = Artificial sequence related to HLA knockouts in cell therapy
  source 1..22: mol_type = other DNA
ccaggacacggagctcgtggag

SEQ ID NO: 21570 - DNA, 22 bp, synthetic construct
  misc_feature 1..22: note = Artificial sequence related to HLA knockouts in cell therapy
  source 1..22: mol_type = other DNA
caggacacggagctcgtggaga

SEQ ID NO: 21571 - DNA, 22 bp, synthetic construct
  misc_feature 1..22: note = Artificial sequence related to HLA knockouts in cell therapy
  source 1..22: mol_type = other DNA
aggacacggagctcgtggagac

SEQ ID NO: 21572 - DNA, 22 bp, synthetic construct
  misc_feature 1..22: note = Artificial sequence related to HLA knockouts in cell therapy
  source 1..22: mol_type = other DNA
ggacacggagctcgtggagacc

SEQ ID NO: 21573 - DNA, 22 bp, synthetic construct
  misc_feature 1..22: note = Artificial sequence related to HLA knockouts in cell therapy
  source 1..22: mol_type = other DNA
gacacggagctcgtggagacca

SEQ ID NO: 21574 - DNA, 22 bp, synthetic construct
  misc_feature 1..22: note = Artificial sequence related to HLA knockouts in cell therapy
  source 1..22: mol_type = other DNA
acacggagctcgtggagaccag

SEQ ID NO: 21575 - DNA, 22 bp, synthetic construct
  misc_feature 1..22: note = Artificial sequence related to HLA knockouts in cell therapy
  source 1..22: mol_type = other DNA
cacggagctcgtggagaccagg

SEQ ID NO: 21576 - DNA, 22 bp, synthetic construct
  misc_feature 1..22: note = Artificial sequence related to HLA knockouts in cell therapy
  source 1..22: mol_type = other DNA
acggagctcgtggagaccaggc

SEQ ID NO: 21577 - DNA, 22 bp, synthetic construct
  misc_feature 1..22: note = Artificial sequence related to HLA knockouts in cell therapy
  source 1..22: mol_type = other DNA
cggagctcgtggagaccaggcc

SEQ ID NO: 21578 - DNA, 22 bp, synthetic construct
  misc_feature 1..22: note = Artificial sequence related to HLA knockouts in cell therapy
  source 1..22: mol_type = other DNA
ggagctcgtggagaccaggcct

SEQ ID NO: 21579 - DNA, 22 bp, synthetic construct
  misc_feature 1..22: note = Artificial sequence related to HLA knockouts in cell therapy
  source 1..22: mol_type = other DNA
gagctcgtggagaccaggcctg

SEQ ID NO: 21580 - DNA, 22 bp, synthetic construct
  misc_feature 1..22: note = Artificial sequence related to HLA knockouts in cell therapy
  source 1..22: mol_type = other DNA
agctcgtggagaccaggcctgc

SEQ ID NO: 21581 - DNA, 22 bp, synthetic construct
  misc_feature 1..22: note = Artificial sequence related to HLA knockouts in cell therapy
  source 1..22: mol_type = other DNA
gctcgtggagaccaggcctgca

SEQ ID NO: 21582 - DNA, 22 bp, synthetic construct
  misc_feature 1..22: note = Artificial sequence related to HLA knockouts in cell therapy
  source 1..22: mol_type = other DNA
ctcgtggagaccaggcctgcag

SEQ ID NO: 21583 - DNA, 22 bp, synthetic construct
  misc_feature 1..22: note = Artificial sequence related to HLA knockouts in cell therapy
  source 1..22: mol_type = other DNA
tcgtggagaccaggcctgcagg

SEQ ID NO: 21584 - DNA, 22 bp, synthetic construct
  misc_feature 1..22: note = Artificial sequence related to HLA knockouts in cell therapy
  source 1..22: mol_type = other DNA
cgtggagaccaggcctgcaggg

SEQ ID NO: 21585 - DNA, 22 bp, synthetic construct
  misc_feature 1..22: note = Artificial sequence related to HLA knockouts in cell therapy
  source 1..22: mol_type = other DNA
gtggagaccaggcctgcagggg

SEQ ID NO: 21586 - DNA, 22 bp, synthetic construct
  misc_feature 1..22: note = Artificial sequence related to HLA knockouts in cell therapy
  source 1..22: mol_type = other DNA
tggagaccaggcctgcagggga

SEQ ID NO: 21587 - DNA, 22 bp, synthetic construct
  misc_feature 1..22: note = Artificial sequence related to HLA knockouts in cell therapy
  source 1..22: mol_type = other DNA
ggagaccaggcctgcaggggat

SEQ ID NO: 21588 - DNA, 22 bp, synthetic construct
  misc_feature 1..22: note = Artificial sequence related to HLA knockouts in cell therapy
  source 1..22: mol_type = other DNA
gagaccaggcctgcaggggatg

SEQ ID NO: 21589 - DNA, 22 bp, synthetic construct
  misc_feature 1..22: note = Artificial sequence related to HLA knockouts in cell therapy
  source 1..22: mol_type = other DNA
agaccaggcctgcaggggatgg

SEQ ID NO: 21590 - DNA, 22 bp, synthetic construct
  misc_feature 1..22: note = Artificial sequence related to HLA knockouts in cell therapy
  source 1..22: mol_type = other DNA
gaccaggcctgcaggggatgga

SEQ ID NO: 21591 - DNA, 22 bp, synthetic construct
  misc_feature 1..22: note = Artificial sequence related to HLA knockouts in cell therapy
  source 1..22: mol_type = other DNA
accaggcctgcaggggatggaa

SEQ ID NO: 21592 - DNA, 22 bp, synthetic construct
  misc_feature 1..22: note = Artificial sequence related to HLA knockouts in cell therapy
  source 1..22: mol_type = other DNA
ccaggcctgcaggggatggaac

SEQ ID NO: 21593 - DNA, 22 bp, synthetic construct
  misc_feature 1..22: note = Artificial sequence related to HLA knockouts in cell therapy
  source 1..22: mol_type = other DNA
caggcctgcaggggatggaacc

SEQ ID NO: 21594 - DNA, 22 bp, synthetic construct
  misc_feature 1..22: note = Artificial sequence related to HLA knockouts in cell therapy
  source 1..22: mol_type = other DNA
aggcctgcaggggatggaacct

SEQ ID NO: 21595 - DNA, 22 bp, synthetic construct
  misc_feature 1..22: note = Artificial sequence related to HLA knockouts in cell therapy
  source 1..22: mol_type = other DNA
ggcctgcaggggatggaacctt

SEQ ID NO: 21596 - DNA, 22 bp, synthetic construct
  misc_feature 1..22: note = Artificial sequence related to HLA knockouts in cell therapy
  source 1..22: mol_type = other DNA
gcctgcaggggatggaaccttc

SEQ ID NO: 21597 - DNA, 22 bp, synthetic construct
  misc_feature 1..22: note = Artificial sequence related to HLA knockouts in cell therapy
  source 1..22: mol_type = other DNA
cctgcaggggatggaaccttcc

SEQ ID NO: 21598 - DNA, 22 bp, synthetic construct
  misc_feature 1..22: note = Artificial sequence related to HLA knockouts in cell therapy
  source 1..22: mol_type = other DNA
ggaaccttccagaagtgggcgg

SEQ ID NO: 21599 - DNA, 22 bp, synthetic construct
  misc_feature 1..22: note = Artificial sequence related to HLA knockouts in cell therapy
  source 1..22: mol_type = other DNA
gaaccttccagaagtgggcggc

SEQ ID NO: 21600 - DNA, 22 bp, synthetic construct
  misc_feature 1..22: note = Artificial sequence related to HLA knockouts in cell therapy
  source 1..22: mol_type = other DNA
accttccagaagtgggcggctg

SEQ ID NO: 21601 - DNA, 22 bp, synthetic construct
  misc_feature 1..22: note = Artificial sequence related to HLA knockouts in cell therapy
  source 1..22: mol_type = other DNA
ccttccagaagtgggcggctgt

SEQ ID NO: 21602 - DNA, 22 bp, synthetic construct
  misc_feature 1..22: note = Artificial sequence related to HLA knockouts in cell therapy
  source 1..22: mol_type = other DNA
cttccagaagtgggcggctgtg

SEQ ID NO: 21603 - DNA, 22 bp, synthetic construct
  misc_feature 1..22: note = Artificial sequence related to HLA knockouts in cell therapy
  source 1..22: mol_type = other DNA
ttccagaagtgggcggctgtgg

SEQ ID NO: 21604 - DNA, 22 bp, synthetic construct
  misc_feature 1..22: note = Artificial sequence related to HLA knockouts in cell therapy
  source 1..22: mol_type = other DNA
tccagaagtgggcggctgtggt

SEQ ID NO: 21605 - DNA, 22 bp, synthetic construct
  misc_feature 1..22: note = Artificial sequence related to HLA knockouts in cell therapy
  source 1..22: mol_type = other DNA
ccagaagtgggcggctgtggtg

SEQ ID NO: 21606 - DNA, 22 bp, synthetic construct
  misc_feature 1..22: note = Artificial sequence related to HLA knockouts in cell therapy
  source 1..22: mol_type = other DNA
cagaagtgggcggctgtggtgg

SEQ ID NO: 21607 - DNA, 22 bp, synthetic construct
  misc_feature 1..22: note = Artificial sequence related to HLA knockouts in cell therapy
  source 1..22: mol_type = other DNA
agaagtgggcggctgtggtggt

SEQ ID NO: 21608 - DNA, 22 bp, synthetic construct
  misc_feature 1..22: note = Artificial sequence related to HLA knockouts in cell therapy
  source 1..22: mol_type = other DNA
gaagtgggcggctgtggtggtg

SEQ ID NO: 21609 - DNA, 22 bp, synthetic construct
  misc_feature 1..22: note = Artificial sequence related to HLA knockouts in cell therapy
  source 1..22: mol_type = other DNA
aagtgggcggctgtggtggtgc

SEQ ID NO: 21610 - DNA, 22 bp, synthetic construct
  misc_feature 1..22: note = Artificial sequence related to HLA knockouts in cell therapy
  source 1..22: mol_type = other DNA
agtgggcggctgtggtggtgcc

SEQ ID NO: 21611 - DNA, 22 bp, synthetic construct
  misc_feature 1..22: note = Artificial sequence related to HLA knockouts in cell therapy
  source 1..22: mol_type = other DNA
gtgggcggctgtggtggtgcct

SEQ ID NO: 21612 - DNA, 22 bp, synthetic construct
  misc_feature 1..22: note = Artificial sequence related to HLA knockouts in cell therapy
  source 1..22: mol_type = other DNA
tgggcggctgtggtggtgcctt

SEQ ID NO: 21613 - DNA, 22 bp, synthetic construct
  misc_feature 1..22: note = Artificial sequence related to HLA knockouts in cell therapy
  source 1..22: mol_type = other DNA
gggcggctgtggtggtgccttc

SEQ ID NO: 21614 - DNA, 22 bp, synthetic construct
  misc_feature 1..22: note = Artificial sequence related to HLA knockouts in cell therapy
  source 1..22: mol_type = other DNA
ggcggctgtggtggtgccttct

SEQ ID NO: 21615 - DNA, 22 bp, synthetic construct
  misc_feature 1..22: note = Artificial sequence related to HLA knockouts in cell therapy
  source 1..22: mol_type = other DNA
gcggctgtggtggtgccttctg

SEQ ID NO: 21616 - DNA, 22 bp, synthetic construct
  misc_feature 1..22: note = Artificial sequence related to HLA knockouts in cell therapy
  source 1..22: mol_type = other DNA
cggctgtggtggtgccttctgg

SEQ ID NO: 21617 - DNA, 22 bp, synthetic construct
  misc_feature 1..22: note = Artificial sequence related to HLA knockouts in cell therapy
  source 1..22: mol_type = other DNA
ggctgtggtggtgccttctgga

SEQ ID NO: 21618 - DNA, 22 bp, synthetic construct
  misc_feature 1..22: note = Artificial sequence related to HLA knockouts in cell therapy
  source 1..22: mol_type = other DNA
gctgtggtggtgccttctggac

SEQ ID NO: 21619 - DNA, 22 bp, synthetic construct
  misc_feature 1..22: note = Artificial sequence related to HLA knockouts in cell therapy
  source 1..22: mol_type = other DNA
gtggtggtgccttctggacagg

SEQ ID NO: 21620 - DNA, 22 bp, synthetic construct
  misc_feature 1..22: note = Artificial sequence related to HLA knockouts in cell therapy
  source 1..22: mol_type = other DNA
ggtggtgccttctggacaggag

SEQ ID NO: 21621 - DNA, 22 bp, synthetic construct
  misc_feature 1..22: note = Artificial sequence related to HLA knockouts in cell therapy
  source 1..22: mol_type = other DNA
gtggtgccttctggacaggagc

SEQ ID NO: 21622 - DNA, 22 bp, synthetic construct
  misc_feature 1..22: note = Artificial sequence related to HLA knockouts in cell therapy
  source 1..22: mol_type = other DNA
ggtgccttctggacaggagcag

SEQ ID NO: 21623 - DNA, 22 bp, synthetic construct
  misc_feature 1..22: note = Artificial sequence related to HLA knockouts in cell therapy
  source 1..22: mol_type = other DNA
cctgccatgtgcagcatgaggg

SEQ ID NO: 21624 - DNA, 22 bp, synthetic construct
  misc_feature 1..22: note = Artificial sequence related to HLA knockouts in cell therapy
  source 1..22: mol_type = other DNA
gcatgagggtttgcccaagccc

SEQ ID NO: 21625 - DNA, 22 bp, synthetic construct
  misc_feature 1..22: note = Artificial sequence related to HLA knockouts in cell therapy
  source 1..22: mol_type = other DNA
catgagggtttgcccaagcccc

SEQ ID NO: 21626 - DNA, 22 bp, synthetic construct
  misc_feature 1..22: note = Artificial sequence related to HLA knockouts in cell therapy
  source 1..22: mol_type = other DNA
tgagggtttgcccaagcccctc

SEQ ID NO: 21627 - DNA, 22 bp, synthetic construct
  misc_feature 1..22: note = Artificial sequence related to HLA knockouts in cell therapy
  source 1..22: mol_type = other DNA
gagggtttgcccaagcccctca

SEQ ID NO: 21628 - DNA, 22 bp, synthetic construct
  misc_feature 1..22: note = Artificial sequence related to HLA knockouts in cell therapy
  source 1..22: mol_type = other DNA
agggtttgcccaagcccctcac

SEQ ID NO: 21629 - DNA, 22 bp, synthetic construct
  misc_feature 1..22: note = Artificial sequence related to HLA knockouts in cell therapy
  source 1..22: mol_type = other DNA
gggtttgcccaagcccctcacc

SEQ ID NO: 21630 - DNA, 22 bp, synthetic construct
  misc_feature 1..22: note = Artificial sequence related to HLA knockouts in cell therapy
  source 1..22: mol_type = other DNA
ggtttgcccaagcccctcaccc

SEQ ID NO: 21631 - DNA, 22 bp, synthetic construct
  misc_feature 1..22: note = Artificial sequence related to HLA knockouts in cell therapy
  source 1..22: mol_type = other DNA
gtttgcccaagcccctcaccct

SEQ ID NO: 21632 - DNA, 22 bp, synthetic construct
  misc_feature 1..22: note = Artificial sequence related to HLA knockouts in cell therapy
  source 1..22: mol_type = other DNA
tttgcccaagcccctcaccctg

SEQ ID NO: 21633 - DNA, 22 bp, synthetic construct
  misc_feature 1..22: note = Artificial sequence related to HLA knockouts in cell therapy
  source 1..22: mol_type = other DNA
ttgcccaagcccctcaccctga

SEQ ID NO: 21634 - DNA, 22 bp, synthetic construct
  misc_feature 1..22: note = Artificial sequence related to HLA knockouts in cell therapy
  source 1..22: mol_type = other DNA
tgcccaagcccctcaccctgag

SEQ ID NO: 21635 - DNA, 22 bp, synthetic construct
  misc_feature 1..22: note = Artificial sequence related to HLA knockouts in cell therapy
  source 1..22: mol_type = other DNA
gcccaagcccctcaccctgaga

SEQ ID NO: 21636 - DNA, 22 bp, synthetic construct
  misc_feature 1..22: note = Artificial sequence related to HLA knockouts in cell therapy
  source 1..22: mol_type = other DNA
cccaagcccctcaccctgagat

SEQ ID NO: 21637 - DNA, 22 bp, synthetic construct
  misc_feature 1..22: note = Artificial sequence related to HLA knockouts in cell therapy
  source 1..22: mol_type = other DNA
ccaagcccctcaccctgagatg

SEQ ID NO: 21638 - DNA, 22 bp, synthetic construct
  misc_feature 1..22: note = Artificial sequence related to HLA knockouts in cell therapy
  source 1..22: mol_type = other DNA
caagcccctcaccctgagatgg

SEQ ID NO: 21639 - DNA, 22 bp, synthetic construct
  misc_feature 1..22: note = Artificial sequence related to HLA knockouts in cell therapy
  source 1..22: mol_type = other DNA
aagcccctcaccctgagatggg

SEQ ID NO: 21640 - DNA, 22 bp, synthetic construct
  misc_feature 1..22: note = Artificial sequence related to HLA knockouts in cell therapy
  source 1..22: mol_type = other DNA
agcccctcaccctgagatggga

SEQ ID NO: 21641 - DNA, 22 bp, synthetic construct
  misc_feature 1..22: note = Artificial sequence related to HLA knockouts in cell therapy
  source 1..22: mol_type = other DNA
gcccctcaccctgagatgggag

SEQ ID NO: 21642 - DNA, 22 bp, synthetic construct
  misc_feature 1..22: note = Artificial sequence related to HLA knockouts in cell therapy
  source 1..22: mol_type = other DNA
cccctcaccctgagatgggagc

SEQ ID NO: 21643 - DNA, 22 bp, synthetic construct
  misc_feature 1..22: note = Artificial sequence related to HLA knockouts in cell therapy
  source 1..22: mol_type = other DNA
ccctcaccctgagatgggagcc

SEQ ID NO: 21644 - DNA, 22 bp, synthetic construct
  misc_feature 1..22: note = Artificial sequence related to HLA knockouts in cell therapy
  source 1..22: mol_type = other DNA
cctcaccctgagatgggagccg

SEQ ID NO: 21645 - DNA, 22 bp, synthetic construct
  misc_feature 1..22: note = Artificial sequence related to HLA knockouts in cell therapy
  source 1..22: mol_type = other DNA
ctcaccctgagatgggagccgt

SEQ ID NO: 21646 - DNA, 22 bp, synthetic construct
  misc_feature 1..22: note = Artificial sequence related to HLA knockouts in cell therapy
  source 1..22: mol_type = other DNA
tcaccctgagatgggagccgtc

SEQ ID NO: 21647 - DNA, 22 bp, synthetic construct
  misc_feature 1..22: note = Artificial sequence related to HLA knockouts in cell therapy
  source 1..22: mol_type = other DNA
caccctgagatgggagccgtct

SEQ ID NO: 21648 - DNA, 22 bp, synthetic construct
  misc_feature 1..22: note = Artificial sequence related to HLA knockouts in cell therapy
  source 1..22: mol_type = other DNA
ccctgagatgggagccgtcttc

SEQ ID NO: 21649 - DNA, 22 bp, synthetic construct
  misc_feature 1..22: note = Artificial sequence related to HLA knockouts in cell therapy
  source 1..22: mol_type = other DNA
cctgagatgggagccgtcttcc

SEQ ID NO: 21650 - DNA, 22 bp, synthetic construct
  misc_feature 1..22: note = Artificial sequence related to HLA knockouts in cell therapy
  source 1..22: mol_type = other DNA
ctgagatgggagccgtcttccc

SEQ ID NO: 21651 - DNA, 22 bp, synthetic construct
  misc_feature 1..22: note = Artificial sequence related to HLA knockouts in cell therapy
  source 1..22: mol_type = other DNA
gagatgggagccgtcttcccag

SEQ ID NO: 21652 - DNA, 22 bp, synthetic construct
  misc_feature 1..22: note = Artificial sequence related to HLA knockouts in cell therapy
  source 1..22: mol_type = other DNA
agatgggagccgtcttcccagc

SEQ ID NO: 21653 - DNA, 22 bp, synthetic construct
  misc_feature 1..22: note = Artificial sequence related to HLA knockouts in cell therapy
  source 1..22: mol_type = other DNA
gatgggagccgtcttcccagcc

SEQ ID NO: 21654 - DNA, 22 bp, synthetic construct
  misc_feature 1..22: note = Artificial sequence related to HLA knockouts in cell therapy
  source 1..22: mol_type = other DNA
atgggagccgtcttcccagccc

SEQ ID NO: 21655 - DNA, 22 bp, synthetic construct
  misc_feature 1..22: note = Artificial sequence related to HLA knockouts in cell therapy
  source 1..22: mol_type = other DNA
tgggagccgtcttcccagccca

SEQ ID NO: 21656 - DNA, 22 bp, synthetic construct
  misc_feature 1..22: note = Artificial sequence related to HLA knockouts in cell therapy
  source 1..22: mol_type = other DNA
gggagccgtcttcccagcccac

SEQ ID NO: 21657 - DNA, 22 bp, synthetic construct
  misc_feature 1..22: note = Artificial sequence related to HLA knockouts in cell therapy
  source 1..22: mol_type = other DNA
ggagccgtcttcccagcccacc

SEQ ID NO: 21658 - DNA, 22 bp, synthetic construct
  misc_feature 1..22: note = Artificial sequence related to HLA knockouts in cell therapy
  source 1..22: mol_type = other DNA
gagccgtcttcccagcccacca

SEQ ID NO: 21659 - DNA, 22 bp, synthetic construct
  misc_feature 1..22: note = Artificial sequence related to HLA knockouts in cell therapy
  source 1..22: mol_type = other DNA
agccgtcttcccagcccaccat

SEQ ID NO: 21660 - DNA, 22 bp, synthetic construct
  misc_feature 1..22: note = Artificial sequence related to HLA knockouts in cell therapy
  source 1..22: mol_type = other DNA
gccgtcttcccagcccaccatc

SEQ ID NO: 21661 - DNA, 22 bp, synthetic construct
  misc_feature 1..22: note = Artificial sequence related to HLA knockouts in cell therapy
  source 1..22: mol_type = other DNA
ccgtcttcccagcccaccatcc

SEQ ID NO: 21662 - DNA, 22 bp, synthetic construct
  misc_feature 1..22: note = Artificial sequence related to HLA knockouts in cell therapy
  source 1..22: mol_type = other DNA
cgtcttcccagcccaccatccc

SEQ ID NO: 21663 - DNA, 22 bp, synthetic construct
  misc_feature 1..22: note = Artificial sequence related to HLA knockouts in cell therapy
  source 1..22: mol_type = other DNA
gtcttcccagcccaccatcccc

SEQ ID NO: 21664 - DNA, 22 bp, synthetic construct
  misc_feature 1..22: note = Artificial sequence related to HLA knockouts in cell therapy
  source 1..22: mol_type = other DNA
tcttcccagcccaccatcccca

SEQ ID NO: 21665 - DNA, 22 bp, synthetic construct
  misc_feature 1..22: note = Artificial sequence related to HLA knockouts in cell therapy
  source 1..22: mol_type = other DNA
cttcccagcccaccatccccat

SEQ ID NO: 21666 - DNA, 22 bp, synthetic construct
  misc_feature 1..22: note = Artificial sequence related to HLA knockouts in cell therapy
  source 1..22: mol_type = other DNA
ttcccagcccaccatccccatc

SEQ ID NO: 21667 - DNA, 22 bp, synthetic construct
  misc_feature 1..22: note = Artificial sequence related to HLA knockouts in cell therapy
  source 1..22: mol_type = other DNA
tcccagcccaccatccccatcg

SEQ ID NO: 21668 - DNA, 22 bp, synthetic construct
  misc_feature 1..22: note = Artificial sequence related to HLA knockouts in cell therapy
  source 1..22: mol_type = other DNA
cccagcccaccatccccatcgt

SEQ ID NO: 21669 - DNA, 22 bp, synthetic construct
  misc_feature 1..22: note = Artificial sequence related to HLA knockouts in cell therapy
  source 1..22: mol_type = other DNA
ccagcccaccatccccatcgtg

SEQ ID NO: 21670 - DNA, 22 bp, synthetic construct
  misc_feature 1..22: note = Artificial sequence related to HLA knockouts in cell therapy
  source 1..22: mol_type = other DNA
cagcccaccatccccatcgtgg

SEQ ID NO: 21671 - DNA, 22 bp, synthetic construct
  misc_feature 1..22: note = Artificial sequence related to HLA knockouts in cell therapy
  source 1..22: mol_type = other DNA
agcccaccatccccatcgtggg

SEQ ID NO: 21672 - DNA, 22 bp, synthetic construct
  misc_feature 1..22: note = Artificial sequence related to HLA knockouts in cell therapy
  source 1..22: mol_type = other DNA
gcccaccatccccatcgtgggc

SEQ ID NO: 21673 - DNA, 22 bp, synthetic construct
  misc_feature 1..22: note = Artificial sequence related to HLA knockouts in cell therapy
  source 1..22: mol_type = other DNA
cccaccatccccatcgtgggca

SEQ ID NO: 21674 - DNA, 22 bp, synthetic construct
  misc_feature 1..22: note = Artificial sequence related to HLA knockouts in cell therapy
  source 1..22: mol_type = other DNA
ccaccatccccatcgtgggcat

SEQ ID NO: 21675 - DNA, 22 bp, synthetic construct
  misc_feature 1..22: note = Artificial sequence related to HLA knockouts in cell therapy
  source 1..22: mol_type = other DNA
caccatccccatcgtgggcatc

SEQ ID NO: 21676 - DNA, 22 bp, synthetic construct
  misc_feature 1..22: note = Artificial sequence related to HLA knockouts in cell therapy
  source 1..22: mol_type = other DNA
cgtgggcatcattgctggcctg

SEQ ID NO: 21677 - DNA, 22 bp, synthetic construct
  misc_feature 1..22: note = Artificial sequence related to HLA knockouts in cell therapy
  source 1..22: mol_type = other DNA
gtgggcatcattgctggcctgg

SEQ ID NO: 21678 - DNA, 22 bp, synthetic construct
  misc_feature 1..22: note = Artificial sequence related to HLA knockouts in cell therapy
  source 1..22: mol_type = other DNA
tcactggagctgtggtcgctgc

SEQ ID NO: 21679 - DNA, 22 bp, synthetic construct
  misc_feature 1..22: note = Artificial sequence related to HLA knockouts in cell therapy
  source 1..22: mol_type = other DNA
cactggagctgtggtcgctgct

SEQ ID NO: 21680 - DNA, 22 bp, synthetic construct
  misc_feature 1..22: note = Artificial sequence related to HLA knockouts in cell therapy
  source 1..22: mol_type = other DNA
actggagctgtggtcgctgctg

SEQ ID NO: 21681 - DNA, 22 bp, synthetic construct
  misc_feature 1..22: note = Artificial sequence related to HLA knockouts in cell therapy
  source 1..22: mol_type = other DNA
ctggagctgtggtcgctgctgt

SEQ ID NO: 21682 - DNA, 22 bp, synthetic construct
  misc_feature 1..22: note = Artificial sequence related to HLA knockouts in cell therapy
  source 1..22: mol_type = other DNA
tggagctgtggtcgctgctgtg

SEQ ID NO: 21683 - DNA, 22 bp, synthetic construct
  misc_feature 1..22: note = Artificial sequence related to HLA knockouts in cell therapy
  source 1..22: mol_type = other DNA
ggagctgtggtcgctgctgtga

SEQ ID NO: 21684 - DNA, 22 bp, synthetic construct
  misc_feature 1..22: note = Artificial sequence related to HLA knockouts in cell therapy
  source 1..22: mol_type = other DNA
ggtcgctgctgtgatgtggagg

SEQ ID NO: 21685 - DNA, 22 bp, synthetic construct
  misc_feature 1..22: note = Artificial sequence related to HLA knockouts in cell therapy
  source 1..22: mol_type = other DNA
cgctgctgtgatgtggaggagg

SEQ ID NO: 21686 - DNA, 22 bp, synthetic construct
  misc_feature 1..22: note = Artificial sequence related to HLA knockouts in cell therapy
  source 1..22: mol_type = other DNA
ggagggagctactctcaggctg

SEQ ID NO: 21687 - DNA, 22 bp, synthetic construct
  misc_feature 1..22: note = Artificial sequence related to HLA knockouts in cell therapy
  source 1..22: mol_type = other DNA
gagggagctactctcaggctgc

SEQ ID NO: 21688 - DNA, 22 bp, synthetic construct
  misc_feature 1..22: note = Artificial sequence related to HLA knockouts in cell therapy
  source 1..22: mol_type = other DNA
ggctgcaagcagtgacagtgcc

SEQ ID NO: 21689 - DNA, 22 bp, synthetic construct
  misc_feature 1..22: note = Artificial sequence related to HLA knockouts in cell therapy
  source 1..22: mol_type = other DNA
gctgcaagcagtgacagtgccc

SEQ ID NO: 21690 - DNA, 22 bp, synthetic construct
  misc_feature 1..22: note = Artificial sequence related to HLA knockouts in cell therapy
  source 1..22: mol_type = other DNA
gcaagcagtgacagtgcccagg

SEQ ID NO: 21691 - DNA, 22 bp, synthetic construct
  misc_feature 1..22: note = Artificial sequence related to HLA knockouts in cell therapy
  source 1..22: mol_type = other DNA
caagcagtgacagtgcccaggg

SEQ ID NO: 21692 - DNA, 22 bp, synthetic construct
  misc_feature 1..22: note = Artificial sequence related to HLA knockouts in cell therapy
  source 1..22: mol_type = other DNA
aagcagtgacagtgcccagggc

SEQ ID NO: 21693 - DNA, 22 bp, synthetic construct
  misc_feature 1..22: note = Artificial sequence related to HLA knockouts in cell therapy
  source 1..22: mol_type = other DNA
agcagtgacagtgcccagggct

SEQ ID NO: 21694 - DNA, 22 bp, synthetic construct
  misc_feature 1..22: note = Artificial sequence related to HLA knockouts in cell therapy
  source 1..22: mol_type = other DNA
gcagtgacagtgcccagggctc

SEQ ID NO: 21695 - DNA, 22 bp, synthetic construct
  misc_feature 1..22: note = Artificial sequence related to HLA knockouts in cell therapy
  source 1..22: mol_type = other DNA
cagtgacagtgcccagggctct

SEQ ID NO: 21696 - DNA, 22 bp, synthetic construct
  misc_feature 1..22: note = Artificial sequence related to HLA knockouts in cell therapy
  source 1..22: mol_type = other DNA
agtgacagtgcccagggctctg

SEQ ID NO: 21697 - DNA, 22 bp, synthetic construct
  misc_feature 1..22: note = Artificial sequence related to HLA knockouts in cell therapy
  source 1..22: mol_type = other DNA
gtgacagtgcccagggctctga

SEQ ID NO: 21698 - DNA, 22 bp, synthetic construct
  misc_feature 1..22: note = Artificial sequence related to HLA knockouts in cell therapy
  source 1..22: mol_type = other DNA
gacagtgcccagggctctgatg

SEQ ID NO: 21699 - DNA, 22 bp, synthetic construct
  misc_feature 1..22: note = Artificial sequence related to HLA knockouts in cell therapy
  source 1..22: mol_type = other DNA
cagtgcccagggctctgatgtg

SEQ ID NO: 21700 - DNA, 22 bp, synthetic construct
  misc_feature 1..22: note = Artificial sequence related to HLA knockouts in cell therapy
  source 1..22: mol_type = other DNA
gtgcccagggctctgatgtgtc

SEQ ID NO: 21701 - DNA, 22 bp, synthetic construct
  misc_feature 1..22: note = Artificial sequence related to HLA knockouts in cell therapy
  source 1..22: mol_type = other DNA
gcccagggctctgatgtgtctc

SEQ ID NO: 21702 - DNA, 22 bp, synthetic construct
  misc_feature 1..22: note = Artificial sequence related to HLA knockouts in cell therapy
  source 1..22: mol_type = other DNA
gccttgtgtgggactgagaggc

SEQ ID NO: 21703 - DNA, 22 bp, synthetic construct
  misc_feature 1..22: note = Artificial sequence related to HLA knockouts in cell therapy
  source 1..22: mol_type = other DNA
tgtgaggaggtggggagaccac

SEQ ID NO: 21704 - DNA, 22 bp, synthetic construct
  misc_feature 1..22: note = Artificial sequence related to HLA knockouts in cell therapy
  source 1..22: mol_type = other DNA
gtgaggaggtggggagaccacc

SEQ ID NO: 21705 - DNA, 22 bp, synthetic construct
  misc_feature 1..22: note = Artificial sequence related to HLA knockouts in cell therapy
  source 1..22: mol_type = other DNA
tgaggaggtggggagaccaccc

SEQ ID NO: 21706 - DNA, 22 bp, synthetic construct
  misc_feature 1..22: note = Artificial sequence related to HLA knockouts in cell therapy
  source 1..22: mol_type = other DNA
gaggaggtggggagaccacccc

SEQ ID NO: 21707 - DNA, 22 bp, synthetic construct
  misc_feature 1..22: note = Artificial sequence related to HLA knockouts in cell therapy
  source 1..22: mol_type = other DNA
aggaggtggggagaccacccca

SEQ ID NO: 21708 - DNA, 22 bp, synthetic construct
  misc_feature 1..22: note = Artificial sequence related to HLA knockouts in cell therapy
  source 1..22: mol_type = other DNA
ggaggtggggagaccaccccac

SEQ ID NO: 21709 - DNA, 22 bp, synthetic construct
  misc_feature 1..22: note = Artificial sequence related to HLA knockouts in cell therapy
  source 1..22: mol_type = other DNA
gaggtggggagaccaccccacc

SEQ ID NO: 21710 - DNA, 22 bp, synthetic construct
  misc_feature 1..22: note = Artificial sequence related to HLA knockouts in cell therapy
  source 1..22: mol_type = other DNA
aggtggggagaccaccccaccc

SEQ ID NO: 21711 - DNA, 22 bp, synthetic construct
  misc_feature 1..22: note = Artificial sequence related to HLA knockouts in cell therapy
  source 1..22: mol_type = other DNA
ggtggggagaccaccccacccc

SEQ ID NO: 21712 - DNA, 22 bp, synthetic construct
  misc_feature 1..22: note = Artificial sequence related to HLA knockouts in cell therapy
  source 1..22: mol_type = other DNA
gtggggagaccaccccaccccc

SEQ ID NO: 21713 - DNA, 22 bp, synthetic construct
  misc_feature 1..22: note = Artificial sequence related to HLA knockouts in cell therapy
  source 1..22: mol_type = other DNA
tggggagaccaccccaccccca

SEQ ID NO: 21714 - DNA, 22 bp, synthetic construct
  misc_feature 1..22: note = Artificial sequence related to HLA knockouts in cell therapy
  source 1..22: mol_type = other DNA
ggggagaccaccccacccccat

SEQ ID NO: 21715 - DNA, 22 bp, synthetic construct
  misc_feature 1..22: note = Artificial sequence related to HLA knockouts in cell therapy
  source 1..22: mol_type = other DNA
gggagaccaccccacccccatg

SEQ ID NO: 21716 - DNA, 22 bp, synthetic construct
  misc_feature 1..22: note = Artificial sequence related to HLA knockouts in cell therapy
  source 1..22: mol_type = other DNA
ggagaccaccccacccccatgt

SEQ ID NO: 21717 - DNA, 22 bp, synthetic construct
  misc_feature 1..22: note = Artificial sequence related to HLA knockouts in cell therapy
  source 1..22: mol_type = other DNA
gagaccaccccacccccatgtc

SEQ ID NO: 21718 - DNA, 22 bp, synthetic construct
  misc_feature 1..22: note = Artificial sequence related to HLA knockouts in cell therapy
  source 1..22: mol_type = other DNA
agaccaccccacccccatgtcc

SEQ ID NO: 21719 - DNA, 22 bp, synthetic construct
  misc_feature 1..22: note = Artificial sequence related to HLA knockouts in cell therapy
  source 1..22: mol_type = other DNA
gaccaccccacccccatgtcca

SEQ ID NO: 21720 - DNA, 22 bp, synthetic construct
  misc_feature 1..22: note = Artificial sequence related to HLA knockouts in cell therapy
  source 1..22: mol_type = other DNA
accaccccacccccatgtccac

SEQ ID NO: 21721 - DNA, 22 bp, synthetic construct
  misc_feature 1..22: note = Artificial sequence related to HLA knockouts in cell therapy
  source 1..22: mol_type = other DNA
ccaccccacccccatgtccacc

SEQ ID NO: 21722 - DNA, 22 bp, synthetic construct
  misc_feature 1..22: note = Artificial sequence related to HLA knockouts in cell therapy
  source 1..22: mol_type = other DNA
caccccacccccatgtccacca

SEQ ID NO: 21723 - DNA, 22 bp, synthetic construct
  misc_feature 1..22: note = Artificial sequence related to HLA knockouts in cell therapy
  source 1..22: mol_type = other DNA
accccacccccatgtccaccat

SEQ ID NO: 21724 - DNA, 22 bp, synthetic construct
  misc_feature 1..22: note = Artificial sequence related to HLA knockouts in cell therapy
  source 1..22: mol_type = other DNA
ccccacccccatgtccaccatg

SEQ ID NO: 21725 - DNA, 22 bp, synthetic construct
  misc_feature 1..22: note = Artificial sequence related to HLA knockouts in cell therapy
  source 1..22: mol_type = other DNA
cccacccccatgtccaccatga

SEQ ID NO: 21726 - DNA, 22 bp, synthetic construct
  misc_feature 1..22: note = Artificial sequence related to HLA knockouts in cell therapy
  source 1..22: mol_type = other DNA
ccacccccatgtccaccatgac

SEQ ID NO: 21727 - DNA, 22 bp, synthetic construct
  misc_feature 1..22: note = Artificial sequence related to HLA knockouts in cell therapy
  source 1..22: mol_type = other DNA
cacccccatgtccaccatgacc

SEQ ID NO: 21728 - DNA, 22 bp, synthetic construct
  misc_feature 1..22: note = Artificial sequence related to HLA knockouts in cell therapy
  source 1..22: mol_type = other DNA
acccccatgtccaccatgaccc

SEQ ID NO: 21729 - DNA, 22 bp, synthetic construct
  misc_feature 1..22: note = Artificial sequence related to HLA knockouts in cell therapy
  source 1..22: mol_type = other DNA
cccccatgtccaccatgaccct

SEQ ID NO: 21730 - DNA, 22 bp, synthetic construct
  misc_feature 1..22: note = Artificial sequence related to HLA knockouts in cell therapy
  source 1..22: mol_type = other DNA
ccccatgtccaccatgaccctc

SEQ ID NO: 21731 - DNA, 22 bp, synthetic construct
  misc_feature 1..22: note = Artificial sequence related to HLA knockouts in cell therapy
  source 1..22: mol_type = other DNA
ccaccatgaccctcttcccacg

SEQ ID NO: 21732 - DNA, 22 bp, synthetic construct
  misc_feature 1..22: note = Artificial sequence related to HLA knockouts in cell therapy
  source 1..22: mol_type = other DNA
caccatgaccctcttcccacgc

SEQ ID NO: 21733 - DNA, 22 bp, synthetic construct
  misc_feature 1..22: note = Artificial sequence related to HLA knockouts in cell therapy
  source 1..22: mol_type = other DNA
ccatgaccctcttcccacgctg

SEQ ID NO: 21734 - DNA, 22 bp, synthetic construct
  misc_feature 1..22: note = Artificial sequence related to HLA knockouts in cell therapy
  source 1..22: mol_type = other DNA
tgaccctcttcccacgctgacc

SEQ ID NO: 21735 - DNA, 22 bp, synthetic construct
  misc_feature 1..22: note = Artificial sequence related to HLA knockouts in cell therapy
  source 1..22: mol_type = other DNA
gaccctcttcccacgctgacct

SEQ ID NO: 21736 - DNA, 22 bp, synthetic construct
  misc_feature 1..22: note = Artificial sequence related to HLA knockouts in cell therapy
  source 1..22: mol_type = other DNA
accctcttcccacgctgacctg

SEQ ID NO: 21737 - DNA, 22 bp, synthetic construct
  misc_feature 1..22: note = Artificial sequence related to HLA knockouts in cell therapy
  source 1..22: mol_type = other DNA
ccctcttcccacgctgacctgt

SEQ ID NO: 21738 - DNA, 22 bp, synthetic construct
  misc_feature 1..22: note = Artificial sequence related to HLA knockouts in cell therapy
  source 1..22: mol_type = other DNA
cctcttcccacgctgacctgtg

SEQ ID NO: 21739 - DNA, 22 bp, synthetic construct
  misc_feature 1..22: note = Artificial sequence related to HLA knockouts in cell therapy
  source 1..22: mol_type = other DNA
ctcttcccacgctgacctgtgc

SEQ ID NO: 21740 - DNA, 22 bp, synthetic construct
  misc_feature 1..22: note = Artificial sequence related to HLA knockouts in cell therapy
  source 1..22: mol_type = other DNA
cttcccacgctgacctgtgctc

SEQ ID NO: 21741 - DNA, 22 bp, synthetic construct
  misc_feature 1..22: note = Artificial sequence related to HLA knockouts in cell therapy
  source 1..22: mol_type = other DNA
ttcccacgctgacctgtgctcc

SEQ ID NO: 21742 - DNA, 22 bp, synthetic construct
  misc_feature 1..22: note = Artificial sequence related to HLA knockouts in cell therapy
  source 1..22: mol_type = other DNA
tcccacgctgacctgtgctccc

SEQ ID NO: 21743 - DNA, 22 bp, synthetic construct
  misc_feature 1..22: note = Artificial sequence related to HLA knockouts in cell therapy
  source 1..22: mol_type = other DNA
cccacgctgacctgtgctccct

SEQ ID NO: 21744 - DNA, 22 bp, synthetic construct
  misc_feature 1..22: note = Artificial sequence related to HLA knockouts in cell therapy
  source 1..22: mol_type = other DNA
ccacgctgacctgtgctccctc

SEQ ID NO: 21745 - DNA, 22 bp, synthetic construct
  misc_feature 1..22: note = Artificial sequence related to HLA knockouts in cell therapy
  source 1..22: mol_type = other DNA
cacgctgacctgtgctccctcc

SEQ ID NO: 21746 - DNA, 22 bp, synthetic construct
  misc_feature 1..22: note = Artificial sequence related to HLA knockouts in cell therapy
  source 1..22: mol_type = other DNA
acgctgacctgtgctccctccc

SEQ ID NO: 21747 - DNA, 22 bp, synthetic construct
  misc_feature 1..22: note = Artificial sequence related to HLA knockouts in cell therapy
  source 1..22: mol_type = other DNA
cgctgacctgtgctccctcccc

SEQ ID NO: 21748 - DNA, 22 bp, synthetic construct
  misc_feature 1..22: note = Artificial sequence related to HLA knockouts in cell therapy
  source 1..22: mol_type = other DNA
gctgacctgtgctccctcccca

SEQ ID NO: 21749 - DNA, 22 bp, synthetic construct
  misc_feature 1..22: note = Artificial sequence related to HLA knockouts in cell therapy
  source 1..22: mol_type = other DNA
ctgacctgtgctccctccccaa

SEQ ID NO: 21750 - DNA, 22 bp, synthetic construct
  misc_feature 1..22: note = Artificial sequence related to HLA knockouts in cell therapy
  source 1..22: mol_type = other DNA
gacctgtgctccctccccaatc

SEQ ID NO: 21751 - DNA, 22 bp, synthetic construct
  misc_feature 1..22: note = Artificial sequence related to HLA knockouts in cell therapy
  source 1..22: mol_type = other DNA
tcctgttccagagaggtggggc

SEQ ID NO: 21752 - DNA, 22 bp, synthetic construct
  misc_feature 1..22: note = Artificial sequence related to HLA knockouts in cell therapy
  source 1..22: mol_type = other DNA
cctgttccagagaggtggggct

SEQ ID NO: 21753 - DNA, 22 bp, synthetic construct
  misc_feature 1..22: note = Artificial sequence related to HLA knockouts in cell therapy
  source 1..22: mol_type = other DNA
ctgttccagagaggtggggctg

SEQ ID NO: 21754 - DNA, 22 bp, synthetic construct
  misc_feature 1..22: note = Artificial sequence related to HLA knockouts in cell therapy
  source 1..22: mol_type = other DNA
gttccagagaggtggggctgag

SEQ ID NO: 21755 - DNA, 22 bp, synthetic construct
  misc_feature 1..22: note = Artificial sequence related to HLA knockouts in cell therapy
  source 1..22: mol_type = other DNA
ttccagagaggtggggctgagg

SEQ ID NO: 21756 - DNA, 22 bp, synthetic construct
  misc_feature 1..22: note = Artificial sequence related to HLA knockouts in cell therapy
  source 1..22: mol_type = other DNA
tccagagaggtggggctgaggt

SEQ ID NO: 21757 - DNA, 22 bp, synthetic construct
  misc_feature 1..22: note = Artificial sequence related to HLA knockouts in cell therapy
  source 1..22: mol_type = other DNA
ccagagaggtggggctgaggtg

SEQ ID NO: 21758 - DNA, 22 bp, synthetic construct
  misc_feature 1..22: note = Artificial sequence related to HLA knockouts in cell therapy
  source 1..22: mol_type = other DNA
cagagaggtggggctgaggtgt

SEQ ID NO: 21759 - DNA, 22 bp, synthetic construct
  misc_feature 1..22: note = Artificial sequence related to HLA knockouts in cell therapy
  source 1..22: mol_type = other DNA
agagaggtggggctgaggtgtc

SEQ ID NO: 21760 - DNA, 22 bp, synthetic construct
  misc_feature 1..22: note = Artificial sequence related to HLA knockouts in cell therapy
  source 1..22: mol_type = other DNA
gagaggtggggctgaggtgtct

SEQ ID NO: 21761 - DNA, 22 bp, synthetic construct
  misc_feature 1..22: note = Artificial sequence related to HLA knockouts in cell therapy
  source 1..22: mol_type = other DNA
agaggtggggctgaggtgtctc

SEQ ID NO: 21762 - DNA, 22 bp, synthetic construct
  misc_feature 1..22: note = Artificial sequence related to HLA knockouts in cell therapy
  source 1..22: mol_type = other DNA
gaggtggggctgaggtgtctcc

SEQ ID NO: 21763 - DNA, 22 bp, synthetic construct
  misc_feature 1..22: note = Artificial sequence related to HLA knockouts in cell therapy
  source 1..22: mol_type = other DNA
aggtggggctgaggtgtctcca

SEQ ID NO: 21764 - DNA, 22 bp, synthetic construct
  misc_feature 1..22: note = Artificial sequence related to HLA knockouts in cell therapy
  source 1..22: mol_type = other DNA
ggtggggctgaggtgtctccat

SEQ ID NO: 21765 - DNA, 22 bp, synthetic construct
  misc_feature 1..22: note = Artificial sequence related to HLA knockouts in cell therapy
  source 1..22: mol_type = other DNA
gtggggctgaggtgtctccatc

SEQ ID NO: 21766 - DNA, 22 bp, synthetic construct
  misc_feature 1..22: note = Artificial sequence related to HLA knockouts in cell therapy
  source 1..22: mol_type = other DNA
ggggctgaggtgtctccatctc

SEQ ID NO: 21767 - DNA, 18 bp, synthetic construct
  misc_feature 1..18: note = Artificial sequence related to HLA knockouts in cell therapy
  source 1..18: mol_type = other DNA
agaagcagaggggtcagg

SEQ ID NO: 21768 - DNA, 18 bp, synthetic construct
  misc_feature 1..18: note = Artificial sequence related to HLA knockouts in cell therapy
  source 1..18: mol_type = other DNA
gaagcagaggggtcaggg

SEQ ID NO: 21769 - DNA, 18 bp, synthetic construct
  misc_feature 1..18: note = Artificial sequence related to HLA knockouts in cell therapy
  source 1..18: mol_type = other DNA
gcggtgtatggattgggg

SEQ ID NO: 21770 - DNA, 18 bp, synthetic construct
  misc_feature 1..18: note = Artificial sequence related to HLA knockouts in cell therapy
  source 1..18: mol_type = other DNA
tggattggggagtcccag

SEQ ID NO: 21771 - DNA, 18 bp, synthetic construct
  misc_feature 1..18: note = Artificial sequence related to HLA knockouts in cell therapy
  source 1..18: mol_type = other DNA
ggattggggagtcccagc

SEQ ID NO: 21772 - DNA, 18 bp, synthetic construct
  misc_feature 1..18: note = Artificial sequence related to HLA knockouts in cell therapy
  source 1..18: mol_type = other DNA
gattggggagtcccagcc

SEQ ID NO: 21773 - DNA, 18 bp, synthetic construct
  misc_feature 1..18: note = Artificial sequence related to HLA knockouts in cell therapy
  source 1..18: mol_type = other DNA
tggggagtcccagccttg

SEQ ID NO: 21774 - DNA, 18 bp, synthetic construct
  misc_feature 1..18: note = Artificial sequence related to HLA knockouts in cell therapy
  source 1..18: mol_type = other DNA
ggggagtcccagccttgg

SEQ ID NO: 21775 - DNA, 18 bp, synthetic construct
  misc_feature 1..18: note = Artificial sequence related to HLA knockouts in cell therapy
  source 1..18: mol_type = other DNA
gggagtcccagccttggg

SEQ ID NO: 21776 - DNA, 18 bp, synthetic construct
  misc_feature 1..18: note = Artificial sequence related to HLA knockouts in cell therapy
  source 1..18: mol_type = other DNA
ggagtcccagccttgggg

SEQ ID NO: 21777 - DNA, 18 bp, synthetic construct
  misc_feature 1..18: note = Artificial sequence related to HLA knockouts in cell therapy
  source 1..18: mol_type = other DNA
gagtcccagccttgggga

SEQ ID NO: 21778 - DNA, 18 bp, synthetic construct
  misc_feature 1..18: note = Artificial sequence related to HLA knockouts in cell therapy
  source 1..18: mol_type = other DNA
agtcccagccttggggat

SEQ ID NO: 21779 - DNA, 18 bp, synthetic construct
  misc_feature 1..18: note = Artificial sequence related to HLA knockouts in cell therapy
  source 1..18: mol_type = other DNA
gtcccagccttggggatt

SEQ ID NO: 21780 - skipped

SEQ ID NO: 21781 - RNA, 23 nt, synthetic construct
  misc_feature 1..23: note = 5' Flank Sequence
  source 1..23: mol_type = other RNA
acaccatgttgccagtctctagg

SEQ ID NO: 21782 - RNA, 23 nt, synthetic construct
  misc_feature 1..23: note = 5' Flank Sequence
  source 1..23: mol_type = other RNA
tgatagcaatgtcagcagtgcct

SEQ ID NO: 21783 - RNA, 23 nt, synthetic construct
  misc_feature 1..23: note = 5' Flank Sequence
  source 1..23: mol_type = other RNA
tattgctgttgacagtgagcgac

SEQ ID NO: 21784 - RNA, 21 nt, synthetic construct
  misc_feature 1..21: note = 3' Flank Sequence
  source 1..21: mol_type = other RNA
tggcgtctggcccaaccacac

SEQ ID NO: 21785 - RNA, 21 nt, synthetic construct
  misc_feature 1..21: note = 3' Flank Sequence
  source 1..21: mol_type = other RNA
gtaaggttgaccatactctac

SEQ ID NO: 21786-21790 - skipped (5 entries)

SEQ ID NO: 21791 - RNA, 12 nt, synthetic construct
  misc_feature 1..12: note = Loop Sequence
  source 1..12: mol_type = other RNA
cttcctgtcaga

SEQ ID NO: 21792 - RNA, 15 nt, synthetic construct
  misc_feature 1..15: note = Loop Sequence
  source 1..15: mol_type = other RNA
cttccctttgtcaga

SEQ ID NO: 21793 - RNA, 12 nt, synthetic construct
  misc_feature 1..12: note = Loop Sequence
  source 1..12: mol_type = other RNA
gtgttattcttg

SEQ ID NO: 21794 - RNA, 12 nt, synthetic construct
  misc_feature 1..12: note = Loop Sequence
  source 1..12: mol_type = other RNA
gtgtcttaattg

SEQ ID NO: 21795 - RNA, 12 nt, synthetic construct
  misc_feature 1..12: note = Loop Sequence
  source 1..12: mol_type = other RNA
gtgttagtcttg

SEQ ID NO: 21796 - skipped

SEQ ID NO: 21797 - RNA, 12 nt, synthetic construct
  misc_feature 1..12: note = Loop Sequence
  source 1..12: mol_type = other RNA
ggacatccaggg

SEQ ID NO: 21798 - RNA, 15 nt, synthetic construct
  misc_feature 1..15: note = Loop Sequence
  source 1..15: mol_type = other RNA
gtgaagccacagatg

SEQ ID NO: 21799 - RNA, 10 nt, synthetic construct
  misc_feature 1..10: note = Loop Sequence
  source 1..10: mol_type = other RNA
gattctaaaa

SEQ ID NO: 21800 - DNA, 255 bp, synthetic construct
  misc_feature 1..255: note = U6 Promoter
  source 1..255: mol_type = other DNA
aaggtcgggcaggaagagggcctatttcccatgattccttcatatttgcatatacgatacaaggctgttagagagataattagaattaatttgactgtaaacacaaagatattagtacaaaatacgtgacgtagaaagtaataatttcttgggtagtttgcagttttaaaattatgttttaaaatggactatcatatgcttaccgtaacttgaaagtatttcgatttcttggctttatatatcttgtggaaagga

SEQ ID NO: 21801 - DNA, 223 bp, synthetic construct
  misc_feature 1..223: note = H1 Promoter
  source 1..223: mol_type = other DNA
gaacgctgacgtcatcaacccgctccaaggaatcgcgggcccagtgtcactaggcgggaacacccagcgcgcgtgcgccctggcaggaagatggctgtgagggacaggggagtggcgccctgcaatatttgcatgtcgctatgtgttctgggaaatcaccataaacgtgaaatgtctttggatttgggaatcttataagttctgtatgagaccactctttccc

SEQ ID NO: 21802 - DNA, 369 bp, synthetic construct; identical to SEQ ID NO: 559
  misc_feature 1..369: note = Codon-optimized CT292 VH
  source 1..369: mol_type = other DNA

SEQ ID NO: 21803 - DNA, 807 bp, synthetic construct
  misc_feature 1..807: note = Codon-optimized CT292 VH-VL
  source 1..807: mol_type = other DNA
atggattttcaggtgcagattttcagcttcctgctaatcagtgcctcagtcataatgtccagaggagatatccagatgacccagtccccgagctccctgtccgcctctgtgggcgatagggtcaccatcacctgccgtgccagtcaggatgtgaatactgctgtagcctggtatcaacagaaaccaggaaaagctccgaaactactgatttactcggcatccttcctttattctggagtcccttctcgcttctctggatctagatctgggacggatttcactctgaccatcagcagtctgcagccggaagacttcgcaacttattactgtcagcaacattatactactcctcccacgttcggacagggtaccaaggtggagatcaaacgcactgggtctacatctggatctgggaagccgggttctggtgagggttctgaggttcagctggtggagtctggcggtggcctggtgcagccagggggctcactccgtttgtcctgtgcagcttctggcttcaacattaaagacacctatatacactgggtgcgtcaggccccgggtaagggcctggaatgggttgcaaggatttatcctacgaatggttatactagatatgccgatagcgtcaagggccgtttcactataagcgcagacacatccaaaaacacagcctacctgcagatgaacagcctgcgtgctgaggacactgccgtctattattgttctagatggggaggggacggcttctatgctatggacgtgtggggtcaaggaaccctggtcaccgtttcctcggcggccgca

SEQ ID NO: 21804 - DNA, 603 bp, synthetic construct
  misc_feature 1..603: note = Codon-optimized CT292 intracellullar
  source 1..603: mol_type = other DNA
aggagtaagaggagcaggctcctgcacagtgactacatgaacatgactccccgccgccccgggcccacccgcaagcattaccagccctatgccccaccacgcgacttcgcagcctatcgctcccgtttctctgttgttaaacggggcagaaagaagctcctgtatatattcaaacaaccatttatgagaccagtacaaactactcaagaggaagatggctgtagctgccgatttccagaagaagaagaaggaggatgtgaactgagagtgaagttcagcaggagcgcagacgcccccgcgtaccagcagggccagaaccagctctataacgagctcaatctaggacgaagagaggagtacgatgttttggacaagaggcgtggccgggaccctgagatggggggaaagccgagaaggaagaaccctcaggaaggcctgtacaatgaactgcagaaagataagatggcggaggcctacagtgagattgggatgaaaggcgagcgccggaggggcaaggggcacgatggcctttaccagggtctcagtacagccaccaaggacacctacgacgcccttcacatgcaggccctgccccctcgctag

SEQ ID NO: 21805 - DNA, 1566 bp, synthetic construct
  misc_feature 1..1566: note = Codon-optimized C2162 CAR
  source 1..1566: mol_type = other DNA
atggatatgagagtgcctgcccagctgctcggactgctccttctgtggttgagaggagctcggtgccaggtgcagctggtgcagtctggggctgaggtgaagaagcctgggtcctcagtgaaggtttcctgcaaggcttctggatacaccttcactagctatcatatacattgggtgcgccaggcccccggacaagggcttgagtggatcggatggatctaccctggcaatgttaacacagaatataatgagaagttcaagggcaaagccaccattaccgcggacgaatccacgaacacagcctacatggagctgagcagcctgagatctgaagacacggctgtgtattactgtgcgagggaggaaattacctacgctatggactactggggccagggaaccctggtcaccgtgtcctcaggaggtggcggctctggaggcggaggtagcggaggtggaggctctggtggcgacattcaaatgacccagagcccatccaccctgagcgcatctgtaggtgaccgggtcaccatcacttgtagatccagtcagagtattgtacacagtaatgggaacacctatttggaatggtatcagcagaaaccaggtaaagccccaaaattgctcatctacaaagtctctaacagatttagtggtgtaccagccaggttcagcggttccggaagtggtactgaattcaccctcacgatctcctctctccagccagatgatttcgccacttattactgttttcaaggttcacatgtgccgcgcacattcggtcagggtactaaagtagaagtcaaatacggctcacagagctccaaaccctacctgctgactcaccctagtgatcctctggagctcgtggtctcaggaccgtctggaggcccaagctctccgacaacaggccccacctccacatctggccctgaggaccagcccctcacacccaccgggtcggatcctcagagtggtctgggaagacacctgggagttgtgatcggcatcttggtggccgtcatcctactgctcctcctcctgctcctgctcttcctcatcctccgacatcgacgtcagggcaaacactggacatcgacccagagaaaggctgatttccaacatcctgcaggggctgtggggccagagcccacagacagaggcctgcagtggaggtccagcccagctgccgatgcccaggaagaaaacctctatgctgccgtgaagcacacacagcctgaggatggggtggagatggatactcggagcccacacgatgaagatccacaggcagtgacgtatgccgaggtgaaacactccagacctagaagggaaatggcctctcctccttccccactgtctggagagttcctggacacaaaggacagacaggcggaagaggacaggcagatggacactgaggctgctgcatctgaagctcctcaggatgtgacctacgcccagctgcacagcttgaccctcagacgggaggcaactgagcctcctccatcccaggaagggccctctccagctgtgcccagcatctacgccactctggccatccac

SEQ ID NO: 21806 - protein, 243 aa, synthetic construct
  REGION 1..243: note = BB7.1 scFv
VQLQESGPDLVKPSQSLSLTCTVTGYSITSGYSWHWIRQFPRNKLEWMGYIHFSGSTHYHPSLKSRISITRDTSKNQFFLQLNSVTTEDTATYYCARGGVVSHYAMDCWGQGTSVTVSSGGGGSGGGGSGGGGSGGDIQMTQSPASLSVSVGETVTITCRASENIYSNLAWYQQKQGKSPHLLVYAATYLPDGVPSRFSGSGSGTQYSLKINSLQSEDFGSYYCQHFWVTPYTFGGGTKVEIK
